(19) United States
(12) Patent Application Publication
(10) Pub. No.: US 2024/0294914 A1
(43) Pub. Date: Sep. 5, 2024

(54) COMPOSITIONS AND METHODS FOR TREATING HEPATITIS B VIRUS INFECTION

(71) Applicants: Beam Therapeutics Inc., Cambridge, MA (US); INSTITUT NATIONAL DE LA SANTÉ ET DE LA RECHERCHE MÉDICALE (INSERM), Paris Cedex 13 (FR)

(72) Inventors: Elena SMEKALOVA, Cambridge, MA (US); LUIS BARRERA, Cambridge, MA (US); Fabien ZOULIM,, Paris (FR); Maria Guadalupe MARTINEZ,, PARIS Cedex 13 (FR); Barbara TESTONI, PARIS Cedex 13 (FR)

(73) Assignees: BEAM THERAPEUTICS INC., Cambridge, MA (US); INSTITUT NATIONAL DE LA SANTÉ ET DE LA RECHERCHE MÉDICALE (INSERM), Paris Cedex 13, FR (FR)

(21) Appl. No.: 18/617,539

(22) Filed: Mar. 26, 2024

Related U.S. Application Data
(63) Continuation of application No. PCT/US2022/077105, filed on Sep. 27, 2022.
(60) Provisional application No. 63/248,938, filed on Sep. 27, 2021.
(60) Provisional application No. 63/357,623, filed on Jun. 30, 2022.
(60) Provisional application No. 63/371,634, filed on Aug. 16, 2022.

(51) Int. Cl. C12N 15/113; A61K 31/7088; A61K 38/46; A61P 31/20; C12N 9/22

(52) U.S. Cl. CPC C12N 15/113; A61K 31/7088; A61K 38/465; A61P 31/20; C12N 9/22; C12N 2310/20; C12N 2800/80

(57) ABSTRACT

The invention features compositions and methods for introducing mutations into the hepatitis B virus (HBV) genome.

### CROSS-REFERENCE TO RELATED APPLICATION

[0001] This application is a continuation under 35 U.S.C. § 111(a) of PCT International Patent Application No. PCT/US2022/077105, filed Sep. 27, 2022, designating the United States and published in English, which claims priority to and the benefit of U.S. Provisional Application No. 63/371,634, filed Aug. 16, 2022, 63/357,623, filed Jun. 30, 2022, and 63/248,938, filed Sep. 27, 2021, the entire contents of each of which are incorporated by reference herein.

### REFERENCE TO AN ELECTRONIC SEQUENCE LISTING

[0002] The contents of the electronic sequence listing (180802_053005_US_SL.xml; Size: 10,088,113 bytes; and Date of Creation: Apr. 9, 2024) is herein incorporated by reference in its entirety.

### BACKGROUND OF THE INVENTION

[0003] Hepatitis B is a serious liver infection caused by the hepatitis B virus (HBV). HBV is a small DNA hepadnavirus that replicates through an RNA intermediate and can persist in infected cells by integrating into a host's genome. Approximately 257 million people worldwide, including between 850,000 and 2.2 million people in the United States, are chronically infected with HBV. Chronic HBV infection manifests as chronic hepatitis, cirrhosis, and/or hepatocellular carcinoma. Between 20% and 30% of adults who have chronic HBV infection develop hepatocellular carcinoma or cirrhosis. HBV infection is responsible for between 600,000 and 1,000,000 deaths per year.

[0004] Current therapeutic approaches to HBV infection have severe limitations. Antiviral medications, e.g., tenofovir, a nucleotide reverse transcriptase inhibitor, can decrease viral replication but do not cure HBV infected patients. These antiviral therapies can cost patients as much as $500 to $1500 monthly. Due to the extent of liver damage caused by HBV, a transplant becomes necessary in some cases. In addition to the risks inherent in organ transplants, the cost can be prohibitive. Therefore, improved methods for treating HBV infection are urgently required.

### SUMMARY OF THE INVENTION OF THE DISCLOSURE

[0005] As described below, the present invention features compositions and methods for treating hepatitis B virus (HBV) infection by introducing alterations into the HBV genome. In particular embodiments, the invention provides a base editor system (e.g., a fusion protein comprising a programable DNA binding protein, a nucleobase editor, and gRNA) for modifying the HBV genome to introduce changes, such as premature stop codons or in the coding sequence of HBV or deamination of nucleobases in HBV covalently closed circular DNA (cccDNA).

[0006] In one aspect, the invention of the disclosure features a method of editing a nucleobase of a hepatitis B virus (HBV) genome. The method involves contacting the HBV genome with one or more guide RNAs and a base editor containing a polynucleotide programmable DNA binding domain and an adenosine deaminase. The guide RNA targets the base editor to effect an alteration of the nucleobase of the HBV genome. The one or more guide RNAs contain a nucleotide sequence, from 5′ to 3′, or a 1, 2, 3, 4, or 5 nucleotide 5′ and/or 3′ truncation fragment thereof, selected from one or more of ACAAGAAUCCUCACAAUACC (SEQ ID NO: 405), UCGCUGGAUGUGUCUGCGGC (SEQ ID NO:406), CACCUGUAUUCCCAUCCCAU (SEQ ID NO: 407), GGGGCCAAGUCUGUACAGCA (SEQ ID NO: 408), GCUGACGCAACCCCCACUGG (SEQ ID NO: 409), GGAGCUACUGUGGAGUUACU (SEQ ID NO: 410), UUCUUCUAGGGGACCUGCCU (SEQ ID NO: 411), GAGGACAAACGGGCAACAUA (SEQ ID NO: 412), UUGUCAACAAGAAAAACCCC (SEQ ID NO: 413), CCCAAGGUCUUACAUAAGAG (SEQ ID NO: 414), CCGGGCAACGGGGUAAAGGU (SEQ ID NO: 415), ACACAGAAAGGCCUUGUAAG (SEQ ID NO: 416), and CACGCACGCGCUGAUGGCCC (SEQ ID NO: 417).

[0007] In another aspect, the invention of the disclosure features a method of editing a nucleobase of a hepatitis B virus (HBV) genome. The method involves (i) contacting a cell containing an HBV genome with one or more guide RNAs and a base editor containing a polynucleotide programmable DNA binding domain and an adenosine deaminase or cytidine deaminase. The guide RNA targets the base editor to effect an alteration of the nucleobase of the HBV genome, thereby editing a nucleobase in the HBV genome. The method further involves (ii) contacting the cell with an antiretroviral drug. Contacting the cell with the antiretroviral drug is associated with an increase in base editing efficiency relative to a reference cell not contacted with the antiretroviral drug.

[0008] In another aspect, the invention of the disclosure features a method of editing a nucleobase of a hepatitis B virus (HBV) genome. The method involves (i) contacting a cell containing an HBV genome with an mRNA encoding a BE4 and guide RNAs gRNA37 and gRNA40. The guide RNAs targets the base editor to effect an alteration of the nucleobase of the HBV genome, thereby editing a nucleobase in the HBV genome. The method further involves (ii) contacting the cell with lamivudine. Contacting the cell with the antiretroviral drug is associated with an increase in base editing efficiency relative to a reference cell not contacted with the antiretroviral drug.

[0009] In another aspect, the invention of the disclosure features a method of editing a nucleobase of a hepatitis B virus (HBV) genome. The method involves contacting a cell containing an HBV genome with an mRNA encoding a base editor comprising a polynucleotide programmable DNA binding domain and an adenosine deaminase or cytidine deaminase, and guide RNAs comprising the sequences GAAAGCCCAGGAUGAUGGGA (SEQ ID NO: 657) and CCAUGCCCCAAAGCCACCCA (SEQ ID NO: 662). The guide RNAs target the base editor to effect an alteration of the nucleobase of the HBV genome, thereby editing a nucleobase in the HBV genome.

[0010] In another aspect, the invention of the disclosure features a method of treating hepatitis B virus (HBV) infection in a subject. The method involves administering to a subject in need thereof a fusion protein, protein complex, or polynucleotide encoding the fusion protein or protein complex. The fusion protein or protein complex contains a polynucleotide programmable DNA binding domain and a base editor domain that is an adenosine deaminase domain, and one or more guide RNAs that target the base editor domain to effect an A·T to G·C alteration of a nucleobase of the HBV genome. The one or more guide RNAs contain a nucleotide sequence, from 5′ to 3′, or a 1, 2, 3, 4, or 5 nucleotide 5′ and/or 3′ truncation fragment thereof, selected from one or more of ACAAGAAUCCUCACAAUACC (SEQ ID NO: 405), UCGCUGGAUGUGUCUGCGGC (SEQ ID NO:406), CACCUGUAUUCCCAUCCCAU (SEQ ID NO: 407), GGGGCCAAGUCUGUACAGCA (SEQ ID NO: 408), GCUGACGCAACCCCCACUGG (SEQ ID NO: 409), GGAGCUACUGUGGAGUUACU (SEQ ID NO: 410), UUCUUCUAGGGGACCUGCCU (SEQ ID NO: 411), GAGGACAAACGGGCAACAUA (SEQ ID NO: 412), UUGUCAACAAGAAAAACCCC (SEQ ID NO: 413), CCCAAGGUCUUACAUAAGAG (SEQ ID NO: 414), CCGGGCAACGGGGUAAAGGU (SEQ ID NO: 415), ACACAGAAAGGCCUUGUAAG (SEQ ID NO: 416), and CACGCACGCGCUGAUGGCCC (SEQ ID NO: 417).

[0011] In another aspect, the invention of the disclosure features a method of treating a hepatitis B virus (HBV) infection in a subject. The method involves administering to a subject in need thereof one or more polynucleotides encoding a polynucleotide programmable DNA binding domain and a base editor domain that is an adenosine deaminase domain, and one or more guide RNAs that target the base editor domain to effect an A·T to G·C, alteration of a nucleobase of the HBV genome. The one or more guide RNAs contain a nucleotide sequence, from 5′ to 3′, or a 1, 2, 3, 4, or 5 nucleotide 5′ and/or 3′ truncation fragment thereof, selected from one or more of ACAAGAAUCCUCACAAUACC (SEQ ID NO: 405), UCGCUGGAUGUGUCUGCGGC (SEQ ID NO:406), CACCUGUAUUCCCAUCCCAU (SEQ ID NO: 407), GGGGCCAAGUCUGUACAGCA (SEQ ID NO: 408), GCUGACGCAACCCCCACUGG (SEQ ID NO: 409), GGAGCUACUGUGGAGUUACU (SEQ ID NO: 410), UUCUUCUAGGGGACCUGCCU (SEQ ID NO: 411), GAGGACAAACGGGCAACAUA (SEQ ID NO: 412), UUGUCAACAAGAAAAACCCC (SEQ ID NO: 413), CCCAAGGUCUUACAUAAGAG (SEQ ID NO: 414), CCGGGCAACGGGGUAAAGGU (SEQ ID NO: 415), ACACAGAAAGGCCUUGUAAG (SEQ ID NO: 416), and CACGCACGCGCUGAUGGCCC (SEQ ID NO: 417).

[0012] In another aspect, the invention of the disclosure features a method of treating a hepatitis B virus (HBV) infection in a subject. The method involves administering to a subject in need thereof with one or more guide RNAs and a base editor containing a polynucleotide programmable DNA binding domain and an adenosine deaminase or cytidine deaminase. The one or more guide RNAs contain the sequences GAAAGCCCAGGAUGAUGGGA (SEQ ID NO: 657) and CCAUGCCCCAAAGCCACCCA (SEQ ID NO: 662) that target said base editor to effect an alteration of the nucleobase of the HBV genome, thereby editing a nucleobase in the HBV genome.

[0013] In another aspect, the invention of the disclosure features a composition containing a base editor(s) bound to a guide RNA(s). The guide RNA(s) contain a nucleotide sequence, from 5′ to 3′, or a 1, 2, 3, 4, or 5 nucleotide 5′ and/or 3′ truncation fragment thereof, selected from one or more of ACAAGAAUCCUCACAAUACC (SEQ ID NO: 405), UCGCUGGAUGUGUCUGCGGC (SEQ ID NO:406), CACCUGUAUUCCCAUCCCAU (SEQ ID NO: 407), GGGGCCAAGUCUGUACAGCA (SEQ ID NO: 408), GCUGACGCAACCCCCACUGG (SEQ ID NO: 409), GGAGCUACUGUGGAGUUACU (SEQ ID NO: 410), UUCUUCUAGGGGACCUGCCU (SEQ ID NO: 411), GAGGACAAACGGGCAACAUA (SEQ ID NO: 412), UUGUCAACAAGAAAAACCCC (SEQ ID NO: 413), CCCAAGGUCUUACAUAAGAG (SEQ ID NO: 414), CCGGGCAACGGGGUAAAGGU (SEQ ID NO: 415), ACACAGAAAGGCCUUGUAAG (SEQ ID NO: 416), and CACGCACGCGCUGAUGGCCC (SEQ ID NO: 417).

[0014] In another aspect, the invention of the disclosure features pharmaceutical composition for the treatment of HBV infection. The composition contains (i) a base editor, or a nucleic acid encoding the base editor, and one or more guide RNAs (gRNA) containing a nucleic acid sequence complementary to an HBV gene in a pharmaceutically acceptable excipient. The one or more guide RNAs contain a nucleotide sequence, from 5′ to 3′, or a 1, 2, 3, 4, or 5 nucleotide 5′ and/or 3′ truncation fragment thereof, selected from one or more of ACAAGAAUCCUCACAAUACC (SEQ ID NO: 405), UCGCUGGAUGUGUCUGCGGC (SEQ ID NO:406), CACCUGUAUUCCCAUCCCAU (SEQ ID NO: 407), GGGGCCAAGUCUGUACAGCA (SEQ ID NO: 408), GCUGACGCAACCCCCACUGG (SEQ ID NO: 409), GGAGCUACUGUGGAGUUACU (SEQ ID NO: 410), UUCUUCUAGGGGACCUGCCU (SEQ ID NO: 411), GAGGACAAACGGGCAACAUA (SEQ ID NO: 412), UUGUCAACAAGAAAAACCCC (SEQ ID NO: 413), CCCAAGGUCUUACAUAAGAG (SEQ ID NO: 414), CCGGGCAACGGGGUAAAGGU (SEQ ID NO: 415), ACACAGAAAGGCCUUGUAAG (SEQ ID NO: 416), and CACGCACGCGCUGAUGGCCC (SEQ ID NO: 417).

[0015] In another aspect, the invention of the disclosure features a method of treating HBV infection. The method involves administering to a subject in need thereof the composition of any one of the above aspects

[0016] In another aspect, the invention of the disclosure features a method of treating an HBV infection, the method involves administering to a subject in need thereof the pharmaceutical composition of any one of the above aspects.

[0017] In another aspect, the invention of the disclosure features a use of the composition of any one of the above aspects in the treatment of HBV infection in a subject.

[0018] In another aspect, the invention of the disclosure features a use of the pharmaceutical composition of any one of the above aspects in the treatment of HBV infection in a subject.

[0019] In another aspect, the invention of the disclosure features a guide RNA containing a nucleotide sequence, from 5′ to 3′, or a 1, 2, 3, 4, or 5 nucleotide 5′ and/or 3′ truncation fragment thereof, selected from one or more of ACAAGAAUCCUCACAAUACC (SEQ ID NO: 405), UCGCUGGAUGUGUCUGCGGC (SEQ ID NO:406), CACCUGUAUUCCCAUCCCAU (SEQ ID NO: 407), GGGGCCAAGUCUGUACAGCA (SEQ ID NO: 408), GCUGACGCAACCCCCACUGG (SEQ ID NO: 409), GGAGCUACUGUGGAGUUACU (SEQ ID NO: 410), UUCUUCUAGGGGACCUGCCU (SEQ ID NO: 411), GAGGACAAACGGGCAACAUA (SEQ ID NO: 412), UUGUCAACAAGAAAAACCCC (SEQ ID NO: 413), CCCAAGGUCUUACAUAAGAG (SEQ ID NO: 414), CCGGGCAACGGGGUAAAGGU (SEQ ID NO: 415), ACACAGAAAGGCCUUGUAAG (SEQ ID NO: 416), and CACGCACGCGCUGAUGGCCC (SEQ ID NO: 417).

[0020] In another aspect, the invention of the disclosure features a pharmaceutical composition containing (i) a nucleic acid encoding a base editor; and (ii) the guide RNA of any one of the above aspects.

[0021] In any of the above aspects, the antiretroviral drug is selected from one or more of Lamivudine, Entecavir, Tenofovir, Interferon, and Peg-Interferon. In any of the above aspects, the retroviral drug is lamivudine.

[0022] In any of the above aspects, step (i) precedes step (ii) or step (ii) precedes step (i). In any of the above aspects, the cell is first contacted with the antiretroviral drug about or at least about 1, 2, 3, 4, 5, 6, 7, 8, 9, 10, 11, 12, 13, or 14 days prior to step (i). In any of the above aspects, the cell has not been previously contacted with the antiretroviral drug. In any of the above aspects, the cell is in a subject. In any of the above aspects, the contacting is in a eukaryotic cell, a mammalian cell, or a human cell. In any of the above aspects, the cell is in vivo or ex vivo. In any of the above aspects or embodiments thereof, the subject is a mammal or a human. In any of the above aspects or embodiments thereof, the subject is a mammal. In any of the above aspects or embodiments thereof, the subject is a human.

[0023] In any of the above aspects, the HBV genome is contacted with two or more guide RNAs simultaneously.

[0024] In any of the above aspects the guide RNA is selected from one or more of

(SEQ ID NO: 405)
ACAAGAAUCCUCACAAUACC,
(SEQ ID NO: 406)
UCGCUGGAUGUGUCUGCGGC,
(SEQ ID NO: 407)
CACCUGUAUUCCCAUCCCAU,
(SEQ ID NO: 408)
GGGGCCAAGUCUGUACAGCA,
(SEQ ID NO: 409)
GCUGACGCAACCCCCACUGG,
(SEQ ID NO: 410)
GGAGCUACUGUGGAGUUACU,
(SEQ ID NO: 411)
UUCUUCUAGGGGACCUGCCU,
(SEQ ID NO: 412)
GAGGACAAACGGGCAACAUA,
(SEQ ID NO: 413)
UUGUCAACAAGAAAAACCCC,
(SEQ ID NO: 414)
CCCAAGGUCUUACAUAAGAG,
(SEQ ID NO: 415)
CCGGGCAACGGGGUAAAGGU,
(SEQ ID NO: 416)
ACACAGAAAGGCCUUGUAAG,
and
(SEQ ID NO: 417)
CACGCACGCGCUGAUGGCCC.

[0025] In any of the above aspects, the one or more guide RNAs contain a spacer sequence selected from a sequence listed in Table 2A, Table 2B, Table 2C, and/or SEQ ID NOs: 3105-5485 and 8220-10830.

[0026] In any of the above aspects, the one or more guide RNAs contain spacers containing the nucleotide sequences GAAAGCCCAGGAUGAUGGGA (SEQ ID NO: 657) and CCAUGCCCCAAAGCCACCCA (SEQ ID NO: 662). In any of the above aspects, the one or more guide RNAs contain the nucleotide sequences

(SEQ ID NO: 424)
mG*mA*mA*AGCCCAGGAUGAUGGGAGUUUUAGAGCUAGAAAUAGCAAG
UUAAAAUAAGGCUAGUCCGUUAUCAACUUGAAAAAGUGGCACCGAGUCG
GUGCUmU*mU*mU*
and
(SEQ ID NO: 422)
mC*mC*mA*UGCCCCAAAGCCACCCAGUUUUAGAGCUAGAAAUAGCAAG
UUAAAAUAAGGCUAGUCCGUUAUCAACUUGAAAAAGUGGCACCGAGUCG
GUGCUmU*mU*mU*.

[0027] In any of the above aspects, base editing efficiency is improved by at least about 5%, 10%, 15%, or 20%.

[0028] In any of the above aspects, the adenosine deaminase converts a target A·T to G·C in the hepatitis B virus (HBV) genome.

[0029] In any of the above aspects, the nucleobase is in a polynucleotide encoding an HBV protein. In any of the above aspects, the nucleobase is in a polynucleotide sequence encoding an HBV protein selected from HBV core protein (Core), HBV polymerase (Pol), HBV surface protein, or HBV protein X. In embodiments of any of the above aspects, the alteration of the nucleobase in the polynucleotide encoding the HBV protein results in a missense mutation. In embodiments of any of the above aspects, the alteration of the nucleobase is associated with a reduction in transcription of a polynucleotide sequence encoding an HBV protein. In embodiments of any of the above aspects, the HBV protein is HBV polymerase (Pol), and/or HBV protein X. In embodiments of any of the above aspects, the missense mutation is in an HBV pol gene. In embodiments of any of the above aspects, the missense mutation results in an E24G, L25F, P26F, R27C, V48A, V48I, S382F, V378I, V378A, V379I, V379A, L377F, D380G, D380N, F381P, R376G, A422T, F423P, A432V, M433V, P434S, D540G, A688V, D689G, A717T, E718K, P713S, P713L, or L719P in an HBV polymerase protein encoded by the HBV pol gene. In embodiments of any of the above aspects, the missense mutation is in an HBV core gene. In embodiments of any of the above aspects, the missense mutation results in a T160A, T160A, P161F, S162L, C183R, or *184Q in an HBV core protein encoded by the HBV core gene. In embodiments of any of the above aspects, the missense mutation is in an HBV X gene. In embodiments of any of the above aspects, missense mutation results in a H86R, W120R, E122K, E121K, or L141P in an HBV X protein encoded by the HBV X gene. In embodiments of any of the above aspects, the missense mutation is in an HBV S gene. In embodiments of any of the above aspects, the missense mutation results in a S38F, L39F, W35R, W36R, T37I, T37A, R78Q, S34L, F80P, or D33G in an HBV S protein encoded by the HBV S gene.

[0030] In any of the above aspects, the nucleobase is associated with a transcription site. In embodiments of any of the above aspects, the transcription site is selected from one or more of Enhancer II box A, Enhancer I, and the HBX promoter.

[0031] In any of the above aspects, the polynucleotide programmable DNA binding domain contains a Cas12 polypeptide. In any of the above aspects, the polynucleotide programmable DNA binding domain contains Cas12a, Cas12b, Cas12c, Cas12d, Cas12e, Cas12g, Cas12h, or Cas12i. In any of the above aspects, the polynucleotide programmable DNA binding domain contains a sequence with at least about 85% amino acid sequence identity to Bacillus hisashii Cas12b, Bacillus thermoamylovorans Cas12b, Bacillus sp. V3-13 Cas12b, or Alicyclobacillus acidiphilus Cas12b. In any of the above aspects, the polynucleotide programmable DNA binding domain contains a sequence with at least about 85% amino acid sequence identity to Bacillus hiasashii Cas12b (bhCas12b). In any of the above aspects, the polynucleotide programmable DNA binding domain contains a nuclease inactive or nickase variant. In embodiments of any of the above aspects, the nuclease inactive or nickase variant contains a nuclease inactivated bhCas12b which contains amino acid substitutions D952A, S893R, K846R, and E837G, or corresponding amino acid substitutions thereof. In any of the above aspects, the base editor contains a bhCas12b, or a bhCas12b variant containing amino acid substitutions D952A, S893R, K846R, and E837G.

[0032] In any of the above aspects, the base editor contains an adenosine deaminase. In any of the above aspects or embodiments thereof, the adenosine deaminase domain is capable of deaminating adenine in deoxyribonucleic acid (DNA). In any of the above aspects or embodiments thereof, the adenosine deaminase is a TadA deaminase. In embodiments of any of the above aspects, the TadA deaminase is TadA*7.10, TadA*8.1, TadA*8.2, TadA*8.3, TadA*8.4, TadA*8.5, TadA*8.6, TadA*8.7, TadA*8.8, TadA*8.9, TadA*8.10, TadA*8.11, TadA*8.12, TadA*8.13, TadA*8.14, TadA*8.15, TadA*8.16, TadA*8.17, TadA*8.18, TadA*8.19, TadA*8.20, TadA*8.21, TadA*8.22, TadA*8.23, or TadA*8.24. In embodiments of any of the above aspects, the TadA deaminase is TadA*8.13.

[0033] In any of the above aspects, the one or more guide RNAs contains a CRISPR RNA (crRNA) and a trans-encoded small RNA (tracrRNA), where the crRNA contains a nucleic acid sequence complementary to an HBV nucleic acid sequence. In any of the above aspects, the one or more guide RNAs target three, four, or five nucleobases of the HBV genome.

[0034] In any of the above aspects, the base editor is in complex with a single guide RNA (sgRNA) containing a nucleic acid sequence complementary to an HBV nucleic acid sequence.

[0035] In any of the above aspects, the method involves editing two or more nucleobases.

[0036] In any of the above aspects, the method involves contacting the HBV genome with two or more guide RNAs that target two or more HBV nucleic acid sequences. In any of the above aspects, the method involves delivering the fusion protein, the polynucleotide encoding the fusion protein, or one or more polynucleotides encoding the polynucleotide programmable DNA binding domain and the base editor domain, and the one or more guide RNAs to a cell of the subject. In any of the above aspects or embodiments thereof, the cell is a hepatocyte.

[0037] In any of the above aspects, the base editor (i) contains a nuclease inactive bhCas12b; or (ii) contains an amino acid sequence that is at least 80%, 85%, 90%, 95%, 96%, 97%, 98%, 99%, or 100% identical to

(SEQ ID NO: 418)
MSEVEFSHEYWMRHALTLAKRARDEREVPVGAVLVLNNRVIGEGW
NRAIGLHDPTAHAEIMALRQGGLVMQNYRLYDATLYVTFEPCVMC
AGAMIHSRIGRVVFGVRNAKTGAAGSLMDVLHHPGMNHRVEITEG
ILADECAALLCRFFRMPRRVFNAQKKAQSSTDGSSGSETPGTSES
ATPESSGAPKKKRKVGIHGVPAAATRSFILKIEPNEEVKKGLWKT
HEVLNHGIAYYMNILKLIRQEAIYEHHEQDPKNPKKVSKAEIQAE
LWDFVLKMQKCNSFTHEVDKDEVFNILRELYEELVPSSVEKKGEA
NQLSNKFLYPLVDPNSQSGKGTASSGRKPRWYNLKIAGDPSWEEE
KKKWEEDKKKDPLAKILGKLAEYGLIPLFIPYTDSNEPIVKEIKW
MEKSRNQSVRRLDKDMFIQALERFLSWESWNLKVKEEYEKVEKEY
KTLEERIKEDIQALKALEQYEKERQEQLLRDTLNTNEYRLSKRGL
RGWREIIQKWLKMDENEPSEKYLEVFKDYQRKHPREAGDYSVYEF
LSKKENHFIWRNHPEYPYLYATFCEIDKKKKDAKQQATFTLADPI
NHPLWVRFEERSGSNLNKYRILTEQLHTEKLKKKLTVQLDRLIYP
TESGGWEEKGKVDIVLLPSRQFYNQIFLDIEEKGKHAFTYKDESI
KFPLKGTLGGARVOFDRDHLRRYPHKVESGNVGRIYFNMTVNIEP
TESPVSKSLKIHRDDFPKVVNFKPKELTEWIKDSKGKKLKSGIES
LEIGLRVMSIALGQRQAAAASIFEVVDQKPDIEGKLFFPIKGTEL
YAVHRASFNIKLPGETLVKSREVLRKAREDNLKLMNQKLNFLRNV
LHFQQFEDITEREKRVTKWISRQENSDVPLVYQDELIQIRELMYK
PYKDWVAFLKQLHKRLEVEIGKEVKHWRKSLSDGRKGLYGISLKN
IDEIDRTRKFLLRWSLRPTEPGEVRRLEPGORFAIDQLNHLNALK
EDRLKKMANTIIMHALGYCYDVRKKKWQAKNPACQIILFEDLSNY
NPYKERSRFENSRLMKWSRREIPRQVALQGEIYGLQVGEVGAQFS
SRFHAKTGSPGIRCRVVTKEKLQDNRFFKNLQREGRLTLDKIAVL
KEGDLYPDKGGEKFISLSKDRKCVTTHADINAAQNLQKRFWTRTH
GFYKVYCKAYQVDGQTVYIPESKDQKQKIIEEFGEGYFILKDGVY
EWVNAGKLKIKKGSSKQSSSELVDSDILKDSFDLASELKGEKLML
YRDPSGNVFPSDKWMAAGVFFGKLERILISKLTNQYSISTIEDDS
SKQSMKRPAATKKAGQAKKKK.

[0038] In any of the above aspects, the composition or pharmaceutical composition further contains a lipid. In embodiments of any of the above aspects, the lipid is a cationic lipid.

[0039] In any of the above aspects, the composition contains a pharmaceutically acceptable excipient.

[0040] In any of the above aspects, the one or more gRNAs and the base editor are formulated together. In any of the above aspects, the one or more gRNAs and the base editor are formulated separately.

[0041] In any of the above aspects, the composition or pharmaceutical composition further contains a vector suitable for expression in a mammalian cell, where the vector contains a polynucleotide encoding the base editor. In any of the above aspects or embodiments thereof, the vector is a viral vector. In any of the above aspects or embodiments thereof, the viral vector is a retroviral vector, adenoviral vector, lentiviral vector, herpesvirus vector, or adeno-associated viral vector (AAV). In any of the above aspects or embodiments thereof, the composition or pharmaceutical composition further contains an ribonucleoparticle suitable for expression in a mammalian cell.

[0042] In any of the above aspects, the HBV is of genotype A, or of genotype D. In any of the above aspects, the method reduces levels of a marker selected from one or more of Hepatitis B Surface Antigen, Hepatitis B E Antigen, Hepatitis B Virus total DNA, Hepatitis B 3.5 kb RNA, and Hepatitis B covalently closed circular DNA. In any of the above aspects, the method edits the Hepatitis B S antigen site and the PreCore site. In any of the above aspects or embodiments thereof, the editing efficiency is about 30% at the S antigen site and about 60% at the PreCore site.

[0043] In any of the above aspects, the nucleic acid encoding the base editor is an mRNA. In any of the above aspects, the one or more guide RNAs comprise the following scaffold sequence:
[0044] gUUUUAGagcuagaaauagcaaGUUaAaAuAaggcuaGUccGUUAucAAcuugaaaaagugGca ccgagucggugcusususu (SEQ ID NO: 317), wherein a, c, u, or g represents bases with a 2′O-methyl (M) modification, and as, cs, us, or gs represents bases with a 2′-O-methyl 3′-phosphorothioate (MS) modification. In any of the above aspects, the one or more guide RNAs comprise the following nucleotide sequences gsasasAGCCCAGGAUGAUGGGAgUUUUAGagcuagaaauagcaaGUUaAaAuAaggcuaGUcc GUUAucAAcuugaaaaagugGcaccgagucggugcusususu (SEQ ID NO: 424) and cscsasUGCCCCAAAGCCACCCAgUUUUAGagcuagaaauagcaaGUUaAaAuAaggcuaGUcc GUUAucAAcuugaaaaagugGcaccgagucggugcusususu (SEQ ID NO: 422), where a, c, u, or g represent an A, C, U, or G nucleotide containing a 2′O-methyl (M) modification, respectively; and as, cs, us, or gs represent an A, C, U, or G nucleotide containing a 2′-O-methyl 3′-phosphorothioate (MS) modification, respectively.

[0045] In any of the above aspects, the cell is contacted at a first and a second time point with the one or more guide RNAs and the base editor. In embodiments, at least one week separates the first and second times the cell is contacted. In embodiments, at least two weeks separates the first and second times the cell is contacted.

[0046] In any of the above aspects, the base editor is a BE4. In any of the above aspects, the gRNA comprises GAAAGCCCAAGAUGAUGGGA (SEQ ID NO. 10834).

[0047] Compositions and articles defined by the invention were isolated or otherwise manufactured in connection with the examples provided below. Other features and advantages of the invention will be apparent from the detailed description, and from the claims.

### Definitions

[0048] Unless defined otherwise, all technical and scientific terms used herein have the meaning commonly understood by a person skilled in the art to which this invention belongs. The following references provide one of skill with a general definition of many of the terms used in this invention: Singleton et al., Dictionary of Microbiology and Molecular Biology (2nd ed. 1994); The Cambridge Dictionary of Science and Technology (Walker ed., 1988); The Glossary of Genetics, 5th Ed., R. Rieger et al. (eds.), Springer Verlag (1991); and Hale & Marham, The Harper Collins Dictionary of Biology (1991). As used herein, the following terms have the meanings ascribed to them below, unless specified otherwise.

[0049] By “BE4 polypeptide” is meant a polypeptide having at least about 85% identity to the following amino acid sequence, or a fragment thereof having cytidine deamiinase activity:

(SEQ ID NO: 10832)
MSSETGPVAVDPTLRRRIEPHEFEVFFDPRELRKETCLLYEINWG
GRHSIWRHTSQNTNKHVEVNFIEKFTTERYFCPNTRCSITWFLSW
SPCGECSRAITEFLSRYPHVTLFIYIARLYHHADPRNRQGLRDLI
SSGVTIQIMTEQESGYCWRNFVNYSPSNEAHWPRYPHLWVRLYVL
ELYCIILGLPPCLNILRRKQPQLTFFTIALQSCHYQRLPPHILWA
TGLKSGGSSGGSSGSETPGTSESATPESSGGSSGGSDKKYSIGLA
IGTNSVGWAVITDEYKVPSKKFKVLGNTDRHSIKKNLIGALLFDS
GETAEATRLKRTARRRYTRRKNRICYLQEIFSNEMAKVDDSFFHR
LEESFLVEEDKKHERHPIFGNIVDEVAYHEKYPTIYHLRKKLVDS
TDKADLRLIYLALAHMIKFRGHFLIEGDLNPDNSDVDKLFIQLVQ
TYNQLFEENPINASGVDAKAILSARLSKSRRLENLIAQLPGEKKN
GLFGNLIALSLGLTPNFKSNFDLAEDAKLQLSKDTYDDDLDNLLA
QIGDQYADLFLAAKNLSDAILLSDILRVNTEITKAPLSASMIKRY
DEHHQDLTLLKALVRQQLPEKYKEIFFDQSKNGYAGYIDGGASQE
EFYKFIKPILEKMDGTEELLVKLNREDLLRKQRTFDNGSIPHQIH
LGELHAILRRQEDFYPFLKDNREKIEKILTFRIPYYVGPLARGNS
RFAWMTRKSEETITPWNFEEVVDKGASAQSFIERMTNFDKNLPNE
KVLPKHSLLYEYFTVYNELTKVKYVTEGMRKPAFLSGEQKKAIVD
LLFKTNRKVTVKQLKEDYFKKIECFDSVEISGVEDRFNASLGTYH
DLLKIIKDKDFLDNEENEDILEDIVLTLTLFEDREMIEERLKTYA
HLFDDKVMKQLKRRRYTGWGRLSRKLINGIRDKQSGKTILDFLKS
DGFANRNFMQLIHDDSLTFKEDIQKAQVSGQGDSLHEHIANLAGS
PAIKKGILQTVKVVDELVKVMGRHKPENIVIEMARENQTTQKGQK
NSRERMKRIEEGIKELGSQILKEHPVENTQLQNEKLYLYYLQNGR
DMYVDQELDINRLSDYDVDHIVPQSFLKDDSIDNKVLTRSDKNRG
KSDNVPSEEVVKKMKNYWRQLLNAKLITQRKFDNLTKAERGGLSE
LDKAGFIKRQLVETRQITKHVAQILDSRMNTKYDENDKLIREVKV
ITLKSKLVSDFRKDFQFYKVREINNYHHAHDAYLNAVVGTALIKK
YPKLESEFVYGDYKVYDVRKMIAKSEQEIGKATAKYFFYSNIMNF
FKTEITLANGEIRKRPLIETNGETGEIVWDKGRDFATVRKVLSMP
QVNIVKKTEVQTGGFSKESILPKRNSDKLIARKKDWDPKKYGGFD
SPTVAYSVLVVAKVEKGKSKKLKSVKELLGITIMERSSFEKNPID
FLEAKGYKEVKKDLIIKLPKYSLFELENGRKRMLASAGELQKGNE
LALPSKYVNFLYLASHYEKLKGSPEDNEQKQLFVEQHKHYLDEII
EQISEFSKRVILADANLDKVLSAYNKHRDKPIREQAENIIHLFTL
TNLGAPAAFKYFDTTIDRKRYTSTKEVLDATLIHQSITGLYETRI
DLSQLGGDSGGSGGSGGSTNLSDIIEKETGKQLVIQESILMLPEE
VEEVIGNKPESDILVHTAYDESTDENVMLLTSDAPEYKPWALVIQ
DSNGENKIKMLSGGSGGSGGSTNLSDIIEKETGKQLVIQESILML
PEEVEEVIGNKPESDILVHTAYDESTDENVMLLTSDAPEYKPWAL
VIQDSNGENKIKMLSGGSPKKKRK.

[0050] By “BE4 polynucleotide” is meant a polynucleotide encoding a BE4 polypeptide.

[0051] By “HBV polymerase (pol) protein” is meant a polypeptide having at least about 95% identity to a wild-type HBV polymerase amino acid sequence or fragment thereof that functions in a hepatitis B viral infection. In one embodiment, the HBV polymerase is encoded by an HBV A, B, C, D, E, F, G, or H genotype. In one embodiment, the HBV polymerase amino acid sequence is provided at UniPro Accession No. Q8B5R0-1, which is reproduced below.

(SEQ ID NO: 370)
MPLSYQHFRRLLLLDDEAGPLEEELPRLADEGLNRRVAEDLNLGN
LNVSIPWTHKVGNFTGLYSSTVPVFNPHWKTPSFPNIHLHQDIIK
KCEQFVGPLTVNEKRRLQLIMPARFYPKVTKYLPLDKGIKPYYPE
HLVNHYFQTRHYLHTLWKAGILYKRETTHSASFCGSPYSWEQDLQ
HGAESFHQQS.

[0052] Mutations in HBV polymerase include: E24G, L25F, P26F, R27C, V48A, V48I, S382F, V378I, V378A, V379I, V379A, L377F, D380G, D380N, F381P, R376G, A422T, F423P, A432V, M433V, P434S, D540G, A688V, D689G, A717T, E718K, P713S, P713L, or L719P.

[0053] Other exemplary HBV DNA polymerases include, for example, NCBI Accession No. AAB59972.1, which has the following sequence:

(SEQ ID NO: 371)
MPLSYQHFRKLLLLDDEAGPLEEELPRLADEGLNRRVAEDLNLGN
LNVSIPWTHKVGNFTGLYSSTVPVFNPHWKTPSFPNIHLHQDIIK
KCEQFVGPLTVNEKRRLQLIMPARFYPKVTKYLPLDKGIKPYYPE
HLVNHYFQTRHYLHTLWKAGILYKRETTHSASFCGSPYSWEQDLQ
HGAESFHQQSSGILSRPPVGSSLQSKHSKSRLGLQSQQGHLARRQ
QGRSWSIRAGFHPTARRPFGVEPSGSGHTTNFASKSASCLHQSPD
RKAAYPAVSTFEKHSSSGHAVEFHNLSPNSARSQSERPVFPCWWL
QFRSSKPCSDYCLSLIVNLLEDWGPCAEHGEHHIRIPRTPSRVTG
GVFLVDKNPHNTAESRLVVDFSQFSRGNYRVSWPKFAVPNLQSLT
NLLSSNLSWLSLDVSAAFYHLPLHPAAMPHLLVGSSGLSRYVARL
SSNSRILNHQHGTMPNLHDYCSRNLYVSLLLLYQTFGRKLHLYSH
PIILGFRKIPMGVGLSPFLLAQFTSAICSVVRRAFPHCLAFSYMD
DVVLGAKSVQHLESLFTAVTNFLLSLGIHLNPNKTKRWGYSLNFM
GYVIGSYGSLPQEHIIQKIKECFRKLPINRPIDWKVCQRIVGLLG
FAAPFTQCGYPALMPLYACIQSKQAFTFSPTYKAFLCKQYLNLYP
VARQRPGLCQVFADATPTGWGLVMGHQRVRGTFSAPLPIHTAELL
AACFARSRSGANIIGTDNSVVLSRKYTSYPWLLGCAANWILRGTS
FVYVPSALNPADDPSRGRLGLSRPLLRLPFRPTTGRTSLYADSPS
VPSHLPDRVHFASPLHVAWRPP.

[0054] By “HBV polymerase gene” is meant a polynucleotide encoding an HBV polymerase.

[0055] By “Hepatitis B surface antigen (HBsAg) polypeptide” or “HBV surface protein (S)” is meant an antigenic protein or fragment thereof having at least about 85% identity to NCBI Accession No. AAB59969.1, which functions in an HBV viral infection. An exemplary HBsAg amino acid sequence is provided below:

(SEQ ID NO: 372)
MENITSGFLGPLLVLQAGFFLLTRILTIPQSLDSWWTSLNFLGGT
TVCLGQNSQSPTSNHSPTSCPPTCPGYRWMCLRRFIIFLFILLLC
LIFLLVLLDYQGMLPVCPLIPGSSTTSTGPCRTCMTTAQGTSMYP
SCCCTKPSDGNCTCIPIPSSWAFGKFLWEWASARFSWLSLLVPFV
QWFVGLSPTVWLSVIWMMWYWGPSLYSILSPFLPLLPIFFCLWVY
I.

[0056] By “HbsAg polynucleotide” is meant a polynucleotide encoding an HBsAg protein.

[0057] By “HBV X-protein” or “HBV protein X” is meant a polypeptide or fragment thereof having at least about 85% identity to NCBI Accession No. AAB59970.1, which functions in an HBV viral infection. An exemplary amino acid sequence is provided below:

(SEQ ID NO: 373)
MAARLCCQLDPARDVLCLRPVGAESCGRPFSGSLGTLSSPSPSAV
PTDHGAHLSLRGLPVCAFSSAGPCALRFTSARRMETTVNAHRMLP
KVLHKRTLGLSAMSTTDLEAYFKDCLFKDWEELGEEIRLKVFVLG
GCRHKLVCAPAPCNFFTSA.

[0058] By “core antigen precursor,” “precore protein,” or “Hepatitis B e antigen (HBeAg)” is meant a polypeptide or fragment thereof having at least about 85% identity to NCBI Accession No. AAB59971.1, reproduced below, which functions in an HBV viral infection.

(SEQ ID NO: 10831)
MQLFHLCLIISCSCPTVQASKLCLGWLWGMDIDPYKEFGATVELL
SFLPSDFFPSVRDLLDTASALYREALESPEHCSPHHTALRQAILC
WGELMTLATWVGVNLEDPASRDLVVSYVNTNMGLKFRQLLWFHIS
CLTFGRETVIEYLVSFGVWIRTPPAYRPPNAPILSTLPETTVVRR
RGRSPRRRTPSPRRRRSQSPRRRRSQSREPQC.

[0059] By “HBV core protein,” “HBc,” or “core protein” is meant a polypeptide having at least about 95% identity to a wild-type HBV core protein amino acid sequence or fragment thereof. In an embodiment, the HBV core protein functions in a hepatitis B viral infection. In one embodiment, the HBV core protein is encoded by an HBV A, B, C, D, E, F, G, or H genotype. In one embodiment, the HBV core protein amino acid sequence is provided at NCBI GenBank Accession No. AXG50928.1, provided below:

(SEQ ID NO: 374)
MDIDPYKEFGASVELLSFLPSDFFPSIRDLLDTASALYREALESP
EHCSPHHTALRQAILCWGELMNLATWVGSNLEDPASRELVVSYVN
VNMGLKIRQLLWFHISCLTFGRETVLEYLVSFGVWIRTPPAYRPP
NAPILSTLPETTVVRRRGRSPRRRTPSPRRRRSQSPRRRRSQSRE
SQC.
By “HBV X protein” is meant a
polynucleotide encoding an
HBV X-protein.

[0060] By “HBV X protein (genotype B)” is meant a polypeptide having at least about 95% identity to a wild-type HBV genotype B X protein amino acid sequence or fragment thereof. In an embodiment, the HBV X protein functions in a hepatitis B viral infection. In one embodiment, the HBV genotype B X protein amino acid sequence is provided at NCBI GenBank Accession No. BAQ95575.1, provided below:

(SEQ ID NO: 375)
MAARLCCQLDPARDVLCLRPVGAESRGRPLPGPLGALPPASPPVV
PSDHGAHLSLRGLPVCAFSSXGPCALRFTSARRMETTVNAHRNLP
KVLHKRTLGLSAMSTTDLEAYFKDCVFXEWEELGEEXRLKVFVLG
GCRHKLVCSPAPCNFFTSA.

[0061] By “HBV X protein (genotype C)” is meant a polypeptide having at least about 95% identity to a wild-type HBV genotype C X protein amino acid sequence or fragment thereof. In an embodiment, the HBV X protein functions in a hepatitis B viral infection. In one embodiment, the HBV genotype C X protein amino acid sequence is provided at NCBI GenBank Accession No. BAQ95563.1, provided below:

(SEQ ID NO: 376)
MAARVCCQLDPARDVLCLRPVGAESRGRPVSGPFGPLPSPSSSAV
PADYGAHLSLRGLPVCAFSSAGPCALRFTSARRMETTVNAHQVLP
KLLHKRTLGLSAMSTTDLEAYFKDCLFKDWEELGEEIRLKVFVLG
GCRHKLVCSPAPCNFFTSA.

[0062] By “HBV S protein” is meant a polypeptide having at least about 95% identity to a wild-type HBV S protein amino acid sequence or fragment thereof. In an embodiment, the HBV S protein functions in a hepatitis B viral infection. In one embodiment, the HBV S protein is encoded by an HBV A, B, C, D, E, F, G, or H genotype. In one embodiment, the HBV S protein amino acid sequence is provided at NCBI GenBank Accession No. ABV02793.1, provided below:

(SEQ ID NO: 377)
MENTTSGFLGPLLVLQAGFFLLTRNLTIPQSLDSWWTSLNFLGGA
PTCPGQNSQSPTSNHSPTSCPPICPGYRWMCLRRFIIFLFILLLC
LIFLLVLLDYQGMLPVCPLLPGTSTTSTGPCKTCTIPAQGTSMFP
SCCCTKPSDGNCTCIPIPSSWAFARFLWEWASVRFSWLSLLVPFV
QWFVGLSPTVWLSVIWMMWYWGPSLYNILSPFLPLLPIFFCLWVYI.

[0063] The complete genome of Hepatitis B virus subtype ayw, complete genome, which includes polynucleotides encoding HBV polymerase, HBsAg protein, HBV X protein, and the core antigen precursor, is provided at GenBank Accession No. U95551.1, which is reproduced below. The nucleotide locations of regions corresponding to regulatory elements (e.g., Enhancer I, Enhancer II box A, HBX promoter) and polypeptides-encoding sequences within the Hepatitis B virus genome are known the art (see, e.g., Panjaworayan, et al. “HBVRegDB: Annotation, comparison, detection and visualization of regulatory elements in hepatitis B virus sequences,” Virol. J., 4:136, DOI: 10.1186/1743-422X-4-136).

(SEQ ID NO: 378)
AATTCCACAACCTTTCACCAAACTCTGCAAGATCCCAGAGTGAGA
GGCCTGTATTTCCCTGCTGGTGGCTCCAGTTCAGGAGCAGTAAAC
CCTGTTCCGACTACTGCCTCTCCCTTATCGTCAATCTTCTCGAGG
ATTGGGGACCCTGCGCTGAACATGGAGAACATCACATCAGGATTC
CTAGGACCCCTTCTCGTGTTACAGGCGGGGTTTTTCTTGTTGACA
AGAATCCTCACAATACCGCAGAGTCTAGACTCGTGGTGGACTTCT
CTCAATTTTCTAGGGGGAACTACCGTGTGTCTTGGCCAAAATTCG
CAGTCCCCAACCTCCAATCACTCACCAACCTCCTGTCCTCCAACT
TGTCCTGGTTATCGCTGGATGTGTCTGCGGCGTTTTATCATCTTC
CTCTTCATCCTGCTGCTATGCCTCATCTTCTTGTTGGTTCTTCTG
GACTATCAAGGTATGTTGCCCGTTTGTCCTCTAATTCCAGGATCC
TCAACCACCAGCACGGGACCATGCCGAACCTGCATGACTACTGCT
CAAGGAACCTCTATGTATCCCTCCTGTTGCTGTACCAAACCTTCG
GACGGAAATTGCACCTGTATTCCCATCCCATCATCCTGGGCTTTC
GGAAAATTCCTATGGGAGTGGGCCTCAGCCCGTTTCTCCTGGCTC
AGTTTACTAGTGCCATTTGTTCAGTGGTTCGTAGGGCTTTCCCCC
ACTGTTTGGCTTTCAGTTATATGGATGATGTGGTATTGGGGGCCA
AGTCTGTACAGCATCTTGAGTCCCTTTTTACCGCTGTTACCAATT
TTCTTTTGTCTTTGGGTATACATTTAAACCCTAACAAAACAAAGA
GATGGGGTTACTCTCTGAATTTTATGGGTTATGTCATTGGAAGTT
ATGGGTCCTTGCCACAAGAACACATCATACAAAAAATCAAAGAAT
GTTTTAGAAAACTTCCTATTAACAGGCCTATTGATTGGAAAGTAT
GTCAACGAATTGTGGGTCTTTTGGGTTTTGCTGCCCCATTTACAC
AATGTGGTTATCCTGCGTTAATGCCCTTGTATGCATGTATTCAAT
CTAAGCAGGCTTTCACTTTCTCGCCAACTTACAAGGCCTTTCTGT
GTAAACAATACCTGAACCTTTACCCCGTTGCCCGGCAACGGCCAG
GTCTGTGCCAAGTGTTTGCTGACGCAACCCCCACTGGCTGGGGCT
TGGTCATGGGCCATCAGCGCGTGCGTGGAACCTTTTCGGCTCCTC
TGCCGATCCATACTGCGGAACTCCTAGCCGCTTGTTTTGCTCGCA
GCAGGTCTGGAGCAAACATTATCGGGACTGATAACTCTGTTGTCC
TCTCCCGCAAATATACATCGTATCCATGGCTGCTAGGCTGTGCTG
CCAACTGGATCCTGCGCGGGACGTCCTTTGTTTACGTCCCGTCGG
CGCTGAATCCTGCGGACGACCCTTCTCGGGGTCGCTTGGGACTCT
CTCGTCCCCTTCTCCGTCTGCCGTTCCGACCGACCACGGGGCGCA
CCTCTCTTTACGCGGACTCCCCGTCTGTGCCTTCTCATCTGCCGG
ACCGTGTGCACTTCGCTTCACCTCTGCACGTCGCATGGAGACCAC
CGTGAACGCCCACCGAATGTTGCCCAAGGTCTTACATAAGAGGAC
TCTTGGACTCTCTGCAATGTCAACGACCGACCTTGAGGCATACTT
CAAAGACTGTTTGTTTAAAGACTGGGAGGAGTTGGGGGAGGAGAT
TAGATTAAAGGTCTTTGTACTAGGAGGCTGTAGGCATAAATTGGT
CTGCGCACCAGCACCATGCAACTTTTTCACCTCTGCCTAATCATC
TCTTGTTCATGTCCTACTGTTCAAGCCTCCAAGCTGTGCCTTGGG
TGGCTTTGGGGCATGGACATCGACCCTTATAAAGAATTTGGAGCT
ACTGTGGAGTTACTCTCGTTTTTGCCTTCTGACTTCTTTCCTTCA
GTACGAGATCTTCTAGATACCGCCTCAGCTCTGTATCGGGAAGCC
TTAGAGTCTCCTGAGCATTGTTCACCTCACCATACTGCACTCAGG
CAAGCAATTCTTTGCTGGGGGGAACTAATGACTCTAGCTACCTGG
GTGGGTGTTAATTTGGAAGATCCAGCATCTAGAGACCTAGTAGTC
AGTTATGTCAACACTAATATGGGCCTAAAGTTCAGGCAACTCTTG
TGGTTTCACATTTCTTGTCTCACTTTTGGAAGAGAAACCGTTATA
GAGTATTTGGTGTCTTTCGGAGTGTGGATTCGCACTCCTCCAGCT
TATAGACCACCAAATGCCCCTATCCTATCAACACTTCCGGAAACT
ACTGTTGTTAGACGACGAGGCAGGTCCCCTAGAAGAAGAACTCCC
TCGCCTCGCAGACGAAGGTCTCAATCGCCGCGTCGCAGAAGATCT
CAATCTCGGGAACCTCAATGTTAGTATTCCTTGGACTCATAAGGT
GGGGAACTTTACTGGTCTTTATTCTTCTACTGTACCTGTCTTTAA
TCCTCATTGGAAAACACCATCTTTTCCTAATATACATTTACACCA
AGACATTATCAAAAAATGTGAACAGTTTGTAGGCCCACTTACAGT
TAATGAGAAAAGAAGATTGCAATTGATTATGCCTGCTAGGTTTTA
TCCAAAGGTTACCAAATATTTACCATTGGATAAGGGTATTAAACC
TTATTATCCAGAACATCTAGTTAATCATTACTTCCAAACTAGACA
CTATTTACACACTCTATGGAAGGCGGGTATATTATATAAGAGAGA
AACAACACATAGCGCCTCATTTTGTGGGTCACCATATTCTTGGGA
ACAAGATCTACAGCATGGGGCAGAATCTTTCCACCAGCAATCCTC
TGGGATTCTTTCCCGACCACCAGTTGGATCCAGCCTTCAGAGCAA
ACACAGCAAATCCAGATTGGGACTTCAATCCCAACAAGGACACCT
GGCCAGACGCCAACAAGGTAGGAGCTGGAGCATTCGGGCTGGGTT
TCACCCCACCGCACGGAGGCCTTTTGGGGTGGAGCCCTCAGGCTC
AGGGCATACTACAAACTTTGCCAGCAAATCCGCCTCCTGCCTCCA
CCAATCGCCAGACAGGAAGGCAGCCTACCCCGCTGTCTCCACCTT
TGAGAAACACTCATCCTCAGGCCATGCAGTGG.

[0064] By “adenine” or “9H-Purin-6-amine” is meant a purine nucleobase with the molecular formula C₅H₅N₅, having the structure,

[chemical structure]

and corresponding to CAS No. 73-24-5.

[0065] By “adenosine” or “4-Amino-1-[(2R,3R,4S,5R)-3,4-dihydroxy-5-(hydroxymethyl)oxolan-2-yl]pyrimidin-2(1H)-one” is meant an adenine molecule attached to a ribose sugar via a glycosidic bond, having the structure

[chemical structure]

and corresponding to CAS No. 65-46-3. Its molecular formula is C₁₀H₁₃N₅O₄.

[0066] By “adenosine deaminase” or “adenine deaminase” is meant a polypeptide or fragment thereof capable of catalyzing the hydrolytic deamination of adenine or adenosine. In some embodiments, the deaminase or deaminase domain is an adenosine deaminase catalyzing the hydrolytic deamination of adenosine to inosine or deoxy adenosine to deoxyinosine. In some embodiments, the adenosine deaminase catalyzes the hydrolytic deamination of adenine or adenosine in deoxyribonucleic acid (DNA). The adenosine deaminases (e.g. engineered adenosine deaminases, evolved adenosine deaminases) provided herein may be from any organism (e.g., eukaryotic, prokaryotic), including but not limited to algae, bacteria, fungi, plants, invertebrates (e.g., insects), and vertebrates (e.g., amphibians, mammals). In some embodiments, the adenosine deaminase is an adenosine deaminase variant with one or more alterations and is capable of deaminating both adenine and cytosine in a target polynucleotide (e.g., DNA, RNA). In some embodiments, the target polynucleotide is single or double stranded. In some embodiments, the adenosine deaminase variant is capable of deaminating both adenine and cytosine in DNA. In some embodiments, the adenosine deaminase variant is capable of deaminating both adenine and cytosine in single-stranded DNA. In some embodiments, the adenosine deaminase variant is capable of deaminating both adenine and cytosine in RNA.

[0067] By “adenosine deaminase activity” is meant catalyzing the deamination of adenine or adenosine to guanine in a polynucleotide. In some embodiments, an adenosine deaminase variant as provided herein maintains adenosine deaminase activity (e.g., at least about 30%, 40%, 50%, 60%, 70%, 80%, 90% or more of the activity of a reference adenosine deaminase (e.g., TadA*8.20 or TadA*8.19)).

[0068] By “Adenosine Base Editor (ABE)” is meant a base editor comprising an adenosine deaminase.

[0069] By “Adenosine Base Editor (ABE) polynucleotide” is meant a polynucleotide encoding an ABE.By “Adenosine Deaminase Base Editor 8 (ABE8) polypeptide” or “ABE8” is meant a base editor as defined herein comprising an adenosine deaminase variant comprising one or more of the alterations listed in Table 15, one of the combinations of alterations listed in Table 15, or an alteration at one or more of the sites listed in Table 15 (e.g., 82 and/or 166) of the following reference sequence:

(SEQ ID NO: 1)
MSEVEFSHEYWMRHALTLAKRARDEREVPVGAVLVLNNRVIGEGW
NRAIGLHDPTAHAEIMALRQGGLVMQNYRLIDATLYVTFEPCVMC
AGAMIHSRIGRVVFGVRNAKTGAAGSLMDVLHYPGMNHRVEITEG
ILADECAALLCYFFRMPRQVFNAQKKAQSSTD.

In some embodiments, ABE8 comprises further alterations, as described herein, relative to the reference sequence.

[0070] By “Adenosine Deaminase Base Editor 8 (ABE8) polynucleotide” is meant a polynucleotide encoding an ABE8.

[0071] “Administering” is referred to herein as providing one or more compositions described herein to a patient or a subject.

[0072] By “agent” is meant any small molecule chemical compound, antibody, nucleic acid molecule, or polypeptide, or fragments thereof.

[0073] By “alteration” is meant a change (increase or decrease) in the level, structure, or activity of an analyte, gene or polypeptide as detected by standard art known methods such as those described herein. As used herein, an alteration includes a 10% change in expression levels, a 25% change, a 40% change, and a 50% or greater change in expression levels. In some embodiments, an alteration includes an insertion, deletion, or substitution of a nucleobase or amino acid.

[0074] By “ameliorate” is meant decrease, suppress, attenuate, diminish, arrest, or stabilize the development or progression of a disease.

[0075] By “analog” is meant a molecule that is not identical, but has analogous functional or structural features. For example, a polypeptide analog retains the biological activity of a corresponding naturally-occurring polypeptide, while having certain biochemical modifications that enhance the analog's function relative to a naturally occurring polypeptide. Such biochemical modifications could increase the analog's protease resistance, membrane permeability, or half-life, without altering, for example, ligand binding. An analog may include an unnatural amino acid.

[0076] By “base editor (BE),” or “nucleobase editor polypeptide (NBE)” is meant an agent that binds a polynucleotide and has nucleobase modifying activity. In various embodiments, the base editor comprises a nucleobase modifying polypeptide (e.g., a deaminase) and a polynucleotide programmable nucleotide binding domain (e.g., Cas9 or Cpf1) in conjunction with a guide polynucleotide (e.g., guide RNA (gRNA)). Representative nucleic acid and protein sequences of base editors are provided in the Sequence Listing as SEQ ID NOs: 2-11.

[0077] By “base editing activity” is meant acting to chemically alter a base within a polynucleotide. In one embodiment, a first base is converted to a second base. In one embodiment, the base editing activity is cytidine deaminase activity, e.g., converting target C·G to T·A. In another embodiment, the base editing activity is adenosine or adenine deaminase activity, e.g., converting A·T to G·C.

[0078] The term “base editor system” refers to an intermolecular complex for editing a nucleobase of a target nucleotide sequence. In various embodiments, the base editor (BE) system comprises (1) a polynucleotide programmable nucleotide binding domain, a deaminase domain (e.g., cytidine deaminase or adenosine deaminase) for deaminating nucleobases in the target nucleotide sequence; and (2) one or more guide polynucleotides (e.g., guide RNA) in conjunction with the polynucleotide programmable nucleotide binding domain. In various embodiments, the base editor (BE) system comprises a nucleobase editor domain selected from an adenosine deaminase or a cytidine deaminase, and a domain having nucleic acid sequence specific binding activity. In some embodiments, the base editor system comprises (1) a base editor (BE) comprising a polynucleotide programmable DNA binding domain and a deaminase domain for deaminating one or more nucleobases in a target nucleotide sequence; and (2) one or more guide RNAs in conjunction with the polynucleotide programmable DNA binding domain. In some embodiments, the polynucleotide programmable nucleotide binding domain is a polynucleotide programmable DNA binding domain. In some embodiments, the base editor is a cytidine base editor (CBE). In some embodiments, the base editor is an adenine or adenosine base editor (ABE). In some embodiments, the base editor is an adenine or adenosine base editor (ABE) or a cytidine base editor (CBE).

[0079] By “base editing activity” is meant acting to chemically alter a base within a polynucleotide. In one embodiment, a first base is converted to a second base. In one embodiment, the base editing activity is cytidine deaminase activity, e.g., converting target C·G to T·A. In another embodiment, the base editing activity is adenosine deaminase activity, e.g., converting A·T to G·C.

[0080] The term “Cas9” or “Cas9 domain” refers to an RNA guided nuclease comprising a Cas9 protein, or a fragment thereof (e.g., a protein comprising an active, inactive, or partially active DNA cleavage domain of Cas9, and/or the gRNA binding domain of Cas9). A Cas9 nuclease is also referred to sometimes as a casnl nuclease or a CRISPR (clustered regularly interspaced short palindromic repeat) associated nuclease.

[0081] The term “conservative amino acid substitution” or “conservative mutation” refers to the replacement of one amino acid by another amino acid with a common property. A functional way to define common properties between individual amino acids is to analyze the normalized frequencies of amino acid changes between corresponding proteins of homologous organisms (Schulz, G. E. and Schirmer, R H., Principles of Protein Structure, Springer-Verlag, New York (1979)). According to such analyses, groups of amino acids can be defined where amino acids within a group exchange preferentially with each other, and therefore resemble each other most in their impact on the overall protein structure (Schulz, G. E. and Schirmer, R H., supra). Non-limiting examples of conservative mutations include amino acid substitutions of amino acids, for example, lysine for arginine and vice versa such that a positive charge can be maintained; glutamic acid for aspartic acid and vice versa such that a negative charge can be maintained; serine for threonine such that a free —OH can be maintained; and glutamine for asparagine such that a free —NH₂ can be maintained.

[0082] The term “coding sequence” or “protein coding sequence” as used interchangeably herein refers to a segment of a polynucleotide that codes for a protein. Coding sequences can also be referred to as open reading frames. The region or sequence is bounded nearer the 5′ end by a start codon and nearer the 3′ end with a stop codon. Stop codons useful with the base editors described herein include the following:

| | | |
|---|---|---|
| Glutamine | CAG → TAG | Stop codon |
| | CAA → TAA | |
| Arginine | CGA → TGA | |
| Tryptophan | TGG → TGA | |
| | TGG → TAG | |
| | TGG → TAA | |

[0083] By “complex” is meant a combination of two or more molecules whose interaction relies on inter-molecular forces. Non-limiting examples of inter-molecular forces include covalent and non-covalent interactions. Non-limiting examples of non-covalent interactions include hydrogen bonding, ionic bonding, halogen bonding, hydrophobic bonding, van der Waals interactions (e.g., dipole-dipole interactions, dipole-induced dipole interactions, and London dispersion forces), and x-effects. In an embodiment, a complex comprises polypeptides, polynucleotides, or a combination of one or more polypeptides and one or more polynucleotides. In one embodiment, a complex comprises one or more polypeptides that associate to form a base editor (e.g., base editor comprising a nucleic acid programmable DNA binding protein, such as Cas9, and a deaminase) and a polynucleotide (e.g., a guide RNA). In an embodiment, the complex is held together by hydrogen bonds. It should be appreciated that one or more components of a base editor (e.g., a deaminase, or a nucleic acid programmable DNA binding protein) may associate covalently or non-covalently. As one example, a base editor may include a deaminase covalently linked to a nucleic acid programmable DNA binding protein (e.g., by a peptide bond). Alternatively, a base editor may include a deaminase and a nucleic acid programmable DNA binding protein that associate noncovalently (e.g., where one or more components of the base editor are supplied in trans and associate directly or via another molecule such as a protein or nucleic acid). In an embodiment, one or more components of the complex are held together by hydrogen bonds.

[0084] By “cytosine” or “4-Aminopyrimidin-2(1H)-one” is meant a urine nucleobase with the molecular formula C₄H₅N₃O, having the structure

[chemical structure]

and corresponding to CAS No. 71-30-7.

[0085] By “cytidine” is meant a cytosine molecule attached to a ribose sugar via a glycosidic bond, having the structure

[chemical structure]

and corresponding to CAS No. 65-46-3. Its molecular formula is C₉H₁₃N₃O₅.

[0086] By “Cytidine Base Editor (CBE)” is meant a base editor comprising a cytidine deaminase.

[0087] By “Cytidine Base Editor (CBE) polynucleotide” is meant a polynucleotide comprising a CBE.

[0088] By “cytidine deaminase” or “cytosine deaminase” is meant a polypeptide or fragment thereof capable of deaminating cytidine or cytosine. In one embodiment, the cytidine deaminase converts cytosine to uracil or 5-methylcytosine to thymine. The terms “cytidine deaminase” and “cytosine deaminase” are used interchangeably throughout the application. Petromyzon marinus cytosine deaminase 1 (PmCDA1) (SEQ ID NO: 13-14), Activation-induced cytidine deaminase (AICDA) (SEQ ID NOs: 15-21), and APOBEC (SEQ ID NOs: 12-61) are exemplary cytidine deaminases. Further exemplary cytidine deaminase (CDA) sequences are provided in the Sequence Listing as SEQ ID NOs: 62-66 and SEQ ID NOs: 67-189. In embodiments, the cytidine deaminase is a BE4, rrA3F, or ppApo.

[0089] By “rra3F polypeptide” is meant a cytidine deaminase having cytidine deaminase activity and with an amino acid sequence with about or at least about 85%, 90%, 95%, 99%, or 100% sequence identity to the following sequence:

(SEQ ID NO: 67)
MKPQIRDHRPNPMEAMYPHIFYFHFENLEKAYGRNETWLCFTVEI
IKQYLPVPWKKGVFRNQVDPETHCHAEKCFLSWFCNNTLSPKKNY
QVTWYTSWSPCPECAGEVAEFLAEHSNVKLTIYTARLYYFWDTDY
QEGLRSLSEEGASVEIMDYEDFQYCWENFVYDDGEPFKRWKGLKY
NFQSLTRRLREILQ.

[0090] By “ppAPOBEC-1 (ppApo)” is meant a cytidine deaminase having cytidine deaminase activity and with an amino acid sequence with about or at least about 85%, 90%, 95%, 99%, or 100% sequence identity to the following sequence:

(SEQ ID NO: 23)
MTSEKGPSTGDPTLRRRIESWEFDVFYDPRELRKETCLLYEIKWG
MSRKIWRSSGKNTTNHVEVNFIKKFTSERRFHSSISCSITWFLSW
SPCWECSQAIREFLSQHPGVTLVIYVARLFWHMDQRNRQGLRDLV
NSGVTIQIMRASEYYHCWRNFVNYPPGDEAHWPQYPPLWMMLYAL
ELHCIILSLPPCLKISRRWQNHLAFFRLHLQNCHYQTIPPHILLA
TGLIHPSVTWR.

[0091] By “cytosine” is meant a pyrimidine nucleobase with the molecular formula C₄H₅N₃O.

[0092] By “cytosine deaminase activity” is meant catalyzing the deamination of cytosine or cytidine. In one embodiment, a polypeptide having cytosine deaminase activity converts an amino group to a carbonyl group. In an embodiment, a cytosine deaminase converts cytosine to uracil (i.e., C to U) or 5-methylcytosine to thymine (i.e., 5mC to T). In some embodiments, a cytosine deaminase as provided herein has increased cytosine deaminase activity (e.g., at least 10-fold, 20-fold, 30-fold, 40-fold, 50-fold, 60-fold, 70-fold, 80-fold, 90-fold, 100-fold or more) relative to a reference cytosine deaminase.

[0093] The term “deaminase” or “deaminase domain,” as used herein, refers to a protein or fragment thereof that catalyzes a deamination reaction.

[0094] “Detect” refers to identifying the presence, absence or amount of the analyte to be detected. In one embodiment, a sequence alteration in a polynucleotide or polypeptide is detected. In another embodiment, the presence of indels is detected.

[0095] By “detectable label” is meant a composition that when linked to a molecule of interest renders the latter detectable, via spectroscopic, photochemical, biochemical, immunochemical, or chemical means. For example, useful labels include radioactive isotopes, magnetic beads, metallic beads, colloidal particles, fluorescent dyes, electron-dense reagents, enzymes (for example, as commonly used in an enzyme linked immunosorbent assay (ELISA)), biotin, digoxigenin, or haptens.

[0096] By “disease” is meant any condition or disorder that damages or interferes with the normal function of a cell, tissue, or organ. Examples of diseases include HBV infection, as well as related diseases and disorders, including cirrhosis, hepatocellular carcinoma (HCC), and any other disease associated with or resulting from HBV infection.

[0097] By “effective amount” is meant the amount of a required to ameliorate the symptoms of a disease relative to an untreated patient. The effective amount of active compound(s) used to practice the present invention for therapeutic treatment of a disease varies depending upon the manner of administration, the age, body weight, and general health of the subject. Ultimately, the attending physician or veterinarian will decide the appropriate amount and dosage regimen. Such amount is referred to as an “effective” amount. In one embodiment, an effective amount is the amount of a base editor of the invention sufficient to introduce an alteration in an HBV genome in a cell (e.g., a cell in vitro or in vivo). In one embodiment, an effective amount is the amount of a base editor required to achieve a therapeutic effect (e.g., to reduce or control an HBV infection). Such therapeutic effect need not be sufficient to alter an HBV genome in all cells of a subject, tissue or organ, but only to alter an HBV genome in about 1%, 5%, 10%, 25%, 50%, 75% or more of the cells present in a subject, tissue or organ. In one embodiment, an effective amount is sufficient to ameliorate one or more symptoms of HBV.

[0098] By “Entecavir” is meant a molecule having the structure

[chemical structure]

corresponding to CAS no. 142217-69-4, and pharmaceutically acceptable salts thereof. Entecavir has antiretroviral activity.

[0099] By “fragment” is meant a portion of a polypeptide or nucleic acid molecule. This portion contains, at least about 10%, 20%, 30%, 40%, 50%, 60%, 70%, 80%, or 90% of the entire length of the reference nucleic acid molecule or polypeptide. A fragment may contain 10, 20, 30, 40, 50, 60, 70, 80, 90, or 100, 200, 300, 400, 500, 600, 700, 800, 900, or 1000 nucleotides or amino acids.

[0100] By “guide polynucleotide” is meant a polynucleotide or polynucleotide complex which is specific for a target sequence and can form a complex with a polynucleotide programmable nucleotide binding domain protein (e.g., Cas9 or Cpf1). In an embodiment, the guide polynucleotide is a guide RNA (gRNA). gRNAs can exist as a complex of two or more RNAs, or as a single RNA molecule.

[0101] “Hybridization” means hydrogen bonding, which may be Watson-Crick, Hoogsteen or reversed Hoogsteen hydrogen bonding, between complementary nucleobases. For example, adenine and thymine are complementary nucleobases that pair through the formation of hydrogen bonds.

[0102] By “increases” is meant a positive alteration of at least 10%, 25%, 50%, 75%, or 100%.

[0103] The terms “inhibitor of base repair”, “base repair inhibitor”, “IBR” or their grammatical equivalents refer to a protein that is capable in inhibiting the activity of a nucleic acid repair enzyme, for example a base excision repair enzyme.

[0104] An “intein” is a fragment of a protein that is able to excise itself and join the remaining fragments (the exteins) with a peptide bond in a process known as protein splicing.

[0105] The terms “isolated,” “purified,” or “biologically pure” refer to material that is free to varying degrees from components which normally accompany it as found in its native state. “Isolate” denotes a degree of separation from original source or surroundings. “Purify” denotes a degree of separation that is higher than isolation. A “purified” or “biologically pure” protein is sufficiently free of other materials such that any impurities do not materially affect the biological properties of the protein or cause other adverse consequences. That is, a nucleic acid or peptide of this invention is purified if it is substantially free of cellular material, viral material, or culture medium when produced by recombinant DNA techniques, or chemical precursors or other chemicals when chemically synthesized. Purity and homogeneity are typically determined using analytical chemistry techniques, for example, polyacrylamide gel electrophoresis or high performance liquid chromatography. The term “purified” can denote that a nucleic acid or protein gives rise to essentially one band in an electrophoretic gel. For a protein that can be subjected to modifications, for example, phosphorylation or glycosylation, different modifications may give rise to different isolated proteins, which can be separately purified.

[0106] By “isolated polynucleotide” is meant a nucleic acid (e.g., a DNA) that is free of the genes which, in the naturally-occurring genome of the organism from which the nucleic acid molecule of the invention is derived, flank the gene. The term therefore includes, for example, a recombinant DNA that is incorporated into a vector; into an autonomously replicating plasmid or virus; or into the genomic DNA of a prokaryote or eukaryote; or that exists as a separate molecule (for example, a cDNA or a genomic or cDNA fragment produced by PCR or restriction endonuclease digestion) independent of other sequences. In addition, the term includes an RNA molecule that is transcribed from a DNA molecule, as well as a recombinant DNA that is part of a hybrid gene encoding additional polypeptide sequence.

[0107] By an “isolated polypeptide” is meant a polypeptide of the invention that has been separated from components that naturally accompany it. Typically, the polypeptide is isolated when it is at least 60%, by weight, free from the proteins and naturally-occurring organic molecules with which it is naturally associated. Preferably, the preparation is at least 75%, more preferably at least 90%, and most preferably at least 99%, by weight, a polypeptide of the invention. An isolated polypeptide of the invention may be obtained, for example, by extraction from a natural source, by expression of a recombinant nucleic acid encoding such a polypeptide; or by chemically synthesizing the protein. Purity can be measured by any appropriate method, for example, column chromatography, polyacrylamide gel electrophoresis, or by HPLC analysis.

[0108] By “lamivudine” or “3TC” is meant a molecule having the structure

[chemical structure]

corresponding to CAS no. 134678-17-4, and having the IUPAC name 2′,3′-dideoxy-3′-thiacytidine 4-Amino-1-[(2R,5S)-2-(hydroxymethyl)-1,3-oxathiolan-5-yl]-1,2-dihydropyrimidin-2-one, and pharmaceutically acceptable salts thereof. Lamivudine has antiretroviral activity. Lamivudine is classified as a nucleoside/nucleotide reverse transcriptase inhibitor (NRTIs).

[0109] The term “linker”, as used herein, refers to a molecule that links two moieties. embodiment, the term “linker” refers to a covalent linker (e.g., covalent bond) or a non-covalent linker.

[0110] By “marker” is meant any protein or polynucleotide having an alteration in expression level or activity that is associated with a disease or disorder. Examples of diseases include HBV infection, as well as related diseases and disorders, including cirrhosis, hepatocellular carcinoma (HCC), and any other disease associated with or resulting from HBV infection. The marker can be an HBV polynucleotide and/or polypeptide. Non-limiting examples of Hepatitis B virus markers include HBsAg, HBeAg, core protein, 3.5 kb viral RNA, and cccDNA (see, e.g., Bai, et al. “Quantification of Pregenomic RNA and Covalently Closed Circular DNA in Hepatitis B Virus-Related Hepatocellular Carcinoma,” Int J Hepatol, 2013:849290 (2013), DOI: 10.1155/2013/849290).

[0111] The term “mutation,” as used herein, refers to a substitution of a residue within a sequence, e.g., a nucleic acid or amino acid sequence, with another residue, or a deletion or insertion of one or more residues within a sequence. Mutations are typically described herein by identifying the original residue followed by the position of the residue within the sequence and by the identity of the newly substituted residue. Various methods for making the amino acid substitutions (mutations) provided herein are well known in the art, and are provided by, for example, Green and Sambrook, Molecular Cloning: A Laboratory Manual (4^{th} ed., Cold Spring Harbor Laboratory Press, Cold Spring Harbor, N.Y. (2012)).

[0112] The terms “nucleic acid” and “nucleic acid molecule,” as used herein, refer to a compound comprising a nucleobase and an acidic moiety, e.g., a nucleoside, a nucleotide, or a polymer of nucleotides. Typically, polymeric nucleic acids, e.g., nucleic acid molecules comprising three or more nucleotides are linear molecules, in which adjacent nucleotides are linked to each other via a phosphodiester linkage. In some embodiments, “nucleic acid” refers to individual nucleic acid residues (e.g. nucleotides and/or nucleosides). In some embodiments, “nucleic acid” refers to an oligonucleotide chain comprising three or more individual nucleotide residues. As used herein, the terms “oligonucleotide” and “polynucleotide” can be used interchangeably to refer to a polymer of nucleotides (e.g., a string of at least three nucleotides). In some embodiments, “nucleic acid” encompasses RNA as well as single and/or double-stranded DNA. Nucleic acids may be naturally occurring, for example, in the context of a genome, a transcript, an mRNA, tRNA, rRNA, siRNA, snRNA, a plasmid, cosmid, chromosome, chromatid, or other naturally occurring nucleic acid molecule. On the other hand, a nucleic acid molecule may be a non-naturally occurring molecule, e.g., a recombinant DNA or RNA, an artificial chromosome, an engineered genome, or fragment thereof, or a synthetic DNA, RNA, DNA/RNA hybrid, or including non-naturally occurring nucleotides or nucleosides.

[0113] Furthermore, the terms “nucleic acid,” “DNA,” “RNA,” and/or similar terms include nucleic acid analogs, e.g., analogs having other than a phosphodiester backbone. Nucleic acids can be purified from natural sources, produced using recombinant expression systems and optionally purified, chemically synthesized, etc. Where appropriate, e.g., in the case of chemically synthesized molecules, nucleic acids can comprise nucleoside analogs such as analogs having chemically modified bases or sugars, and backbone modifications. A nucleic acid sequence is presented in the 5′ to 3′ direction unless otherwise indicated. In some embodiments, a nucleic acid is or comprises natural nucleosides (e.g. adenosine, thymidine, guanosine, cytidine, uridine, deoxyadenosine, deoxythymidine, deoxyguanosine, and deoxycytidine); nucleoside analogs (e.g., 2-aminoadenosine, 2-thiothymidine, inosine, pyrrolo-pyrimidine, 3-methyl adenosine, 5-methylcytidine, 2-aminoadenosine, C5-bromouridine, C5-fluorouridine, C5-iodouridine, C5-propynyl-uridine, C5-propynyl-cytidine, C5-methylcytidine, 2-aminoadenosine, 7-deazaadenosine, 7-deazaguanosine, 8-oxoadenosine, 8-oxoguanosine, O(6)-methylguanine, and 2-thiocytidine); chemically modified bases; biologically modified bases (e.g., methylated bases); intercalated bases; modified sugars (2′—e.g., fluororibose, ribose, 2′-deoxyribose, arabinose, and hexose); and/or modified phosphate groups (e.g., phosphorothioates and 5′-N-phosphoramidite linkages).

[0114] The term “nuclear localization sequence,” “nuclear localization signal,” or “NLS” refers to an amino acid sequence that promotes import of a protein into the cell nucleus. Nuclear localization sequences are known in the art and described, for example, in Plank et al., International PCT application, PCT/EP2000/011690, filed Nov. 23, 2000, published as WO/2001/038547 on May 31, 2001, the contents of which are incorporated herein by reference for their disclosure of exemplary nuclear localization sequences. In other embodiments, the NLS is an optimized NLS described, for example, by Koblan et al., Nature Biotech. 2018 doi:10.1038/nbt.4172. In some embodiments, an NLS comprises the amino acid sequence

(SEQ ID NO: 190)
KRTADGSEFESPKKKRKV,
(SEQ ID NO: 191)
KRPAATKKAGQAKKKK,
(SEQ ID NO: 192)
KKTELQTTNAENKTKKL,
(SEQ ID NO: 193)
KRGINDRNFWRGENGRKTR,
(SEQ ID NO: 194)
RKSGKIAAIVVKRPRK,
(SEQ ID NO: 195)
PKKKRKV,
or
(SEQ ID NO: 196)
MDSLLMNRRKFLYQFKNVRWAKGRRETYLC.

[0115] The term “nucleobase,” “nitrogenous base,” or “base,” used interchangeably herein, refers to a nitrogen-containing biological compound that forms a nucleoside, which in turn is a component of a nucleotide. The ability of nucleobases to form base pairs and to stack one upon another leads directly to long-chain helical structures such as ribonucleic acid (RNA) and deoxyribonucleic acid (DNA). Five nucleobases—adenine (A), cytosine (C), guanine (G), thymine (T), and uracil (U)—are called primary or canonical. Adenine and guanine are derived from purine, and cytosine, uracil, and thymine are derived from pyrimidine. DNA and RNA can also contain other (non-primary) bases that are modified. Non-limiting exemplary modified nucleobases can include hypoxanthine, xanthine, 7-methylguanine, 5,6-dihydrouracil, 5-methylcytosine (m5C), and 5-hydromethylcytosine. Hypoxanthine and xanthine can be created through mutagen presence, both of them through deamination (replacement of the amine group with a carbonyl group). Hypoxanthine can be modified from adenine. Xanthine can be modified from guanine. Uracil can result from deamination of cytosine. A “nucleoside” consists of a nucleobase and a five carbon sugar (either ribose or deoxyribose). Examples of a nucleoside include adenosine, guanosine, uridine, cytidine, 5-methyluridine (m5U), deoxyadenosine, deoxyguanosine, thymidine, deoxyuridine, and deoxycytidine. Examples of a nucleoside with a modified nucleobase includes inosine (I), xanthosine (X), 7-methylguanosine (m7G), dihydrouridine (D), 5-methylcytidine (m5C), and pseudouridine (Ψ). A “nucleotide” consists of a nucleobase, a five carbon sugar (either ribose or deoxyribose), and at least one phosphate group.

[0116] The term “nucleic acid programmable DNA binding protein” or “napDNAbp” may be used interchangeably with “polynucleotide programmable nucleotide binding domain” to refer to a protein that associates with a nucleic acid (e.g., DNA or RNA), such as a guide nucleic acid or guide polynucleotide (e.g., gRNA), that guides the napDNAbp to a specific nucleic acid sequence. In some embodiments, the polynucleotide programmable nucleotide binding domain is a polynucleotide programmable DNA binding domain. In some embodiments, the polynucleotide programmable nucleotide binding domain is a polynucleotide programmable RNA binding domain. In some embodiments, the polynucleotide programmable nucleotide binding domain is a Cas9 protein. A Cas9 protein can associate with a guide RNA that guides the Cas9 protein to a specific DNA sequence that is complementary to the guide RNA. In some embodiments, the napDNAbp is a Cas9 domain, for example a nuclease active Cas9, a Cas9 nickase (nCas9), or a nuclease inactive Cas9 (dCas9). Non-limiting examples of nucleic acid programmable DNA binding proteins include, Cas9 (e.g., dCas9 and nCas9), Cas12a/Cpf1, Cas12b/C2c1, Cas12c/C2c3, Cas12d/CasY, Cas12e/CasX, Cas12g, Cas12h, Cas12i, and Cas12j/Cas4 (Cas12j/Casphi). Non-limiting examples of Cas enzymes include Cas1, Cas1B, Cas2, Cas3, Cas4, Cas5, Cas5d, Cas5t, Cas5h, Cas5a, Cas6, Cas7, Cas8, Cas8a, Cas8b, Cas8c, Cas9 (also known as Csn1 or Csx12), Cas10, Cas10d, Cas12a/Cpf1, Cas12b/C2c1, Cas12c/C2c3, Cas12d/CasY, Cas12e/CasX, Cas12g, Cas12h, Cas12i, Cas12j/CasΦ, Cpf1, Csy1, Csy2, Csy3, Csy4, Cse1, Cse2, Cse3, Cse4, Cse5e, Csc1, Csc2, Csa5, Csn1, Csn2, Csm1, Csm2, Csm3, Csm4, Csm5, Csm6, Cmr1, Cmr3, Cmr4, Cmr5, Cmr6, Csb1, Csb2, Csb3, Csx17, Csx14, Csx10, Csx16, CsaX, Csx3, Csx1, Csx1S, Csx11, Csf1, Csf2, CsO, Csf4, Csd1, Csd2, Cst1, Cst2, Csh1, Csh2, Csa1, Csa2, Csa3, Csa4, Csa5, Type II Cas effector proteins, Type V Cas effector proteins, Type VI Cas effector proteins, CARF, DinG, homologues thereof, or modified or engineered versions thereof. Other nucleic acid programmable DNA binding proteins are also within the scope of this disclosure, although they may not be specifically listed in this disclosure. See, e.g., Makarova et al. “Classification and Nomenclature of CRISPR-Cas Systems: Where from Here?” CRISPR J. 2018 October; 1:325-336. doi: 10.1089/crispr.2018.0033; Yan et al., “Functionally diverse type V CRISPR-Cas systems” Science. 2019 Jan. 4; 363(6422):88-91. doi: 10.1126/science.aav7271, the entire contents of each are hereby incorporated by reference. Exemplary nucleic acid programmable DNA binding proteins and nucleic acid sequences encoding nucleic acid programmable DNA binding proteins are provided in the Sequence Listing as SEQ ID NOs: 197-230.

[0117] The terms “nucleobase editing domain” or “nucleobase editing protein,” as used herein, refers to a protein or enzyme that can catalyze a nucleobase modification in RNA or DNA, such as cytosine (or cytidine) to uracil (or uridine) or thymine (or thymidine), and adenine (or adenosine) to hypoxanthine (or inosine) deaminations, as well as non-templated nucleotide additions and insertions. In some embodiments, the nucleobase editing domain is a deaminase domain (e.g., an adenine deaminase or an adenosine deaminase; or a cytidine deaminase or a cytosine deaminase).

[0118] As used herein, “obtaining” as in “obtaining an agent” includes synthesizing, purchasing, or otherwise acquiring the agent.

[0119] By “subject” is meant a mammal, including, but not limited to, a human or non-human mammal, such as a bovine, equine, canine, ovine, rodent, or feline. In an embodiment, “patient” refers to a mammalian subject with a higher than average likelihood of developing a disease or a disorder. Exemplary patients can be humans, non-human primates, cats, dogs, pigs, cattle, cats, horses, camels, llamas, goats, sheep, rodents (e.g., mice, rabbits, rats, or guinea pigs) and other mammalians that can benefit from the therapies disclosed herein. Exemplary human patients can be male and/or female. Examples of diseases include HBV infection, as well as related diseases and disorders, including cirrhosis, hepatocellular carcinoma (HCC), and any other disease associated with or resulting from HBV infection.

[0120] “Patient in need thereof” or “subject in need thereof” is referred to herein as a patient diagnosed with, at risk or having, predetermined to have, or suspected of having a disease or disorder.

[0121] The terms “pathogenic mutation”, “pathogenic variant”, “disease casing mutation”, “disease causing variant”, “deleterious mutation”, or “predisposing mutation” refers to a genetic alteration or mutation that increases an individual's susceptibility or predisposition to a certain disease or disorder. In some embodiments, the pathogenic mutation comprises at least one wild-type amino acid substituted by at least one pathogenic amino acid in a protein encoded by a gene.

[0122] The terms “protein”, “peptide”, “polypeptide”, and their grammatical equivalents are used interchangeably herein, and refer to a polymer of amino acid residues linked together by peptide (amide) bonds. A protein, peptide, or polypeptide can be naturally occurring, recombinant, or synthetic, or any combination thereof.

[0123] The term “fusion protein” as used herein refers to a hybrid polypeptide which comprises protein domains from at least two different proteins.

[0124] The term “recombinant” as used herein in the context of proteins or nucleic acids refers to proteins or nucleic acids that do not occur in nature, but are the product of human engineering. For example, in some embodiments, a recombinant protein or nucleic acid molecule comprises an amino acid or nucleotide sequence that comprises at least one, at least two, at least three, at least four, at least five, at least six, or at least seven mutations as compared to any naturally occurring sequence.

[0125] By “reduces” is meant a negative alteration of at least 10%, 25%, 50%, 75%, or 100%.

[0126] By “reference” is meant a standard or control condition. In one embodiment, the reference is a wild-type or healthy cell. In other embodiments and without limitation, a reference is an untreated cell that is not subjected to a test condition, or is subjected to placebo or normal saline, medium, buffer, and/or a control vector that does not harbor a polynucleotide of interest. A reference can be a cell or subject free of an HBV infection. A reference can also be a subject prior to receiving a treatment, or prior to an alteration in a treatment.

[0127] A “reference sequence” is a defined sequence used as a basis for sequence comparison. A reference sequence may be a subset of or the entirety of a specified sequence; for example, a segment of a full-length cDNA or gene sequence, or the complete cDNA or gene sequence. For polypeptides, the length of the reference polypeptide sequence will generally be at least about 16 amino acids, at least about 20 amino acids, at least about 25 amino acids, about 35 amino acids, about 50 amino acids, or about 100 amino acids. For nucleic acids, the length of the reference nucleic acid sequence will generally be at least about 50 nucleotides, at least about 60 nucleotides, at least about 75 nucleotides, about 100 nucleotides or about 300 nucleotides or any integer thereabout or therebetween. In some embodiments, a reference sequence is a wild-type sequence of a protein of interest. In other embodiments, a reference sequence is a polynucleotide sequence encoding a wild-type protein.

[0128] The term “RNA-programmable nuclease,” and “RNA-guided nuclease” are used with (e.g., binds or associates with) one or more RNA(s) that is not a target for cleavage. In some embodiments, an RNA-programmable nuclease, when in a complex with an RNA, may be referred to as a nuclease:RNA complex. Typically, the bound RNA(s) is referred to as a guide RNA (gRNA). In some embodiments, the RNA-programmable nuclease is the (CRISPR-associated system) Cas9 endonuclease, for example, Cas9 (Csn1) from Streptococcus pyogenes.

[0129] The term “single nucleotide polymorphism (SNP)” is a variation in a single nucleotide that occurs at a specific position in the genome, where each variation is present to some appreciable degree within a population (e.g., >1%).

[0130] By “specifically binds” is meant a nucleic acid molecule, polypeptide, polypeptide/polynucleotide complex, compound, or molecule that recognizes and binds a polypeptide and/or nucleic acid molecule of the invention, but which does not substantially recognize and bind other molecules in a sample, for example, a biological sample.

[0131] By “substantially identical” is meant a polypeptide or nucleic acid molecule exhibiting at least 50% identity to a reference amino acid sequence. In one embodiment, a reference sequence is a wild-type amino acid or nucleic acid sequence. In another embodiment, a reference sequence is any one of the amino acid or nucleic acid sequences described herein. In one embodiment, such a sequence is at least 60%, 80%, 85%, 90%, 95% or even 99% identical at the amino acid level or nucleic acid level to the sequence used for comparison.

[0132] Sequence identity is typically measured using sequence analysis software (for example, Sequence Analysis Software Package of the Genetics Computer Group, University of Wisconsin Biotechnology Center, 1710 University Avenue, Madison, Wis. 53705, BLAST, BESTFIT, GAP, or PILEUP/PRETTYBOX programs). Such software matches identical or similar sequences by assigning degrees of homology to various substitutions, deletions, and/or other modifications. Conservative substitutions typically include substitutions within the following groups: glycine, alanine; valine, isoleucine, leucine; aspartic acid, glutamic acid, asparagine, glutamine; serine, threonine; lysine, arginine; and phenylalanine, tyrosine. In an exemplary approach to determining the degree of identity, a BLAST program may be used, with a probability score between e⁻³ and e⁻¹⁰⁰ indicating a closely related sequence. COBALT is used, for example, with the following parameters:
[0133] a) alignment parameters: Gap penalties-11,-1 and End-Gap penalties-5,-1,
[0134] b) CDD Parameters: Use RPS BLAST on; Blast E-value 0.003; Find Conserved columns and Recompute on, and
[0135] c) Query Clustering Parameters: Use query clusters on; Word Size 4; Max cluster distance 0.8; Alphabet Regular.
   EMBOSS Needle is used, for example, with the following parameters:
[0136] a) Matrix: BLOSUM62;
[0137] b) GAP OPEN: 10;
[0138] c) GAP EXTEND: 0.5;
[0139] d) OUTPUT FORMAT: pair;
[0140] e) END GAP PENALTY: false;
[0141] f) END GAP OPEN: 10; and
[0142] g) END GAP EXTEND: 0.5.

[0143] Nucleic acid molecules useful in the methods of the invention include any nucleic acid molecule that encodes a polypeptide of the invention or a fragment thereof. Such nucleic acid molecules need not be 100% identical with an endogenous nucleic acid sequence, but will typically exhibit substantial identity. Polynucleotides having “substantial identity” to an endogenous sequence are typically capable of hybridizing with at least one strand of a double-stranded nucleic acid molecule. Nucleic acid molecules useful in the methods of the invention include any nucleic acid molecule that encodes a polypeptide of the invention or a fragment thereof. Such nucleic acid molecules need not be 100% identical with an endogenous nucleic acid sequence, but will typically exhibit substantial identity. Polynucleotides having “substantial identity” to an endogenous sequence are typically capable of hybridizing with at least one strand of a double-stranded nucleic acid molecule. By “hybridize” is meant pair to form a double-stranded molecule between complementary polynucleotide sequences (e.g., a gene described herein), or portions thereof, under various conditions of stringency. (See, e.g., Wahl, G. M. and S. L. Berger (1987) Methods Enzymol. 152:399; Kimmel, A. R. (1987) Methods Enzymol. 152:507).

[0144] For example, stringent salt concentration will ordinarily be less than about 750 mM NaCl and 75 mM trisodium citrate, preferably less than about 500 mM NaCl and 50 mM trisodium citrate, and more preferably less than about 250 mM NaCl and 25 mM trisodium citrate. Low stringency hybridization can be obtained in the absence of organic solvent, e.g., formamide, while high stringency hybridization can be obtained in the presence of at least about 35% formamide, and more preferably at least about 50% formamide. Stringent temperature conditions will ordinarily include temperatures of at least about 30° C., more preferably of at least about 37° C., and most preferably of at least about 42° C. Varying additional parameters, such as hybridization time, the concentration of detergent, e.g., sodium dodecyl sulfate (SDS), and the inclusion or exclusion of carrier DNA, are well known to those skilled in the art. Various levels of stringency are accomplished by combining these various conditions as needed. In a preferred: embodiment, hybridization will occur at 30° C. in 750 mM NaCl, 75 mM trisodium citrate, and 1% SDS. In a more preferred embodiment, hybridization will occur at 37° C. in 500 mM NaCl, 50 mM trisodium citrate, 1% SDS, 35% formamide, and 100 μg/ml denatured salmon sperm DNA (ssDNA). In a most preferred embodiment, hybridization will occur at 42° C. in 250 mM NaCl, 25 mM trisodium citrate, 1% SDS, 50% formamide, and 200 μg/ml ssDNA. Useful variations on these conditions will be readily apparent to those skilled in the art.

[0145] For most applications, washing steps that follow hybridization will also vary in stringency. Wash stringency conditions can be defined by salt concentration and by temperature. As above, wash stringency can be increased by decreasing salt concentration or by increasing temperature. For example, stringent salt concentration for the wash steps will preferably be less than about 30 mM NaCl and 3 mM trisodium citrate, and most preferably less than about 15 mM NaCl and 1.5 mM trisodium citrate. Stringent temperature conditions for the wash steps will ordinarily include a temperature of at least about 25° C., more preferably of at least about 42° C., and even more preferably of at least about 68° C. In an embodiment, wash steps will occur at 25° C. in 30 mM NaCl, 3 mM trisodium citrate, and 0.1% SDS. In another embodiment, wash steps will occur at 42 C in 15 mM NaCl, 1.5 mM trisodium citrate, and 0.1% SDS. In a more preferred embodiment, wash steps will occur at 68° C. in 15 mM NaCl, 1.5 mM trisodium citrate, and 0.1% SDS. Additional variations on these conditions will be readily apparent to those skilled in the art. Hybridization techniques are well known to those skilled in the art and are described, for example, in Benton and Davis (Science 196:180, 1977); Grunstein and Hogness (Proc. Natl. Acad. Sci., USA 72:3961, 1975); Ausubel et al. (Current Protocols in Molecular Biology, Wiley Interscience, New York, 2001); Berger and Kimmel (Guide to Molecular Cloning Techniques, 1987, Academic Press, New York); and Sambrook et al., Molecular Cloning: A Laboratory Manual, Cold Spring Harbor Laboratory Press, New York.

[0146] By “split” is meant divided into two or more fragments.

[0147] A “split Cas9 protein” or “split Cas9” refers to a Cas9 protein that is provided as an N-terminal fragment and a C-terminal fragment encoded by two separate nucleotide sequences. The polypeptides corresponding to the N-terminal portion and the C-terminal portion of the Cas9 protein may be spliced to form a “reconstituted” Cas9 protein.

[0148] The term “target site” refers to a sequence within a nucleic acid molecule that is deaminated by a deaminase (e.g., cytidine or adenine deaminase) or a fusion protein comprising a deaminase (e.g., a dCas9-adenosine deaminase fusion protein or a base editor disclosed herein).

[0149] By “Tenofovir” is meant a molecule having the structure

[chemical structure]

corresponding to CAS no. 147127-20-6, and pharmaceutically acceptable salts thereof. Tenofovir has antiretroviral activity. Tenofovir is classified as a nucleoside/nucleotide reverse transcriptase inhibitor (NRTIs).

[0150] As used herein, the terms “treat,” treating,” “treatment,” and the like refer to reducing or ameliorating a disorder and/or symptoms associated therewith or obtaining a desired pharmacologic and/or physiologic effect. It will be appreciated that, although not precluded, treating a disorder or condition does not require that the disorder, condition or symptoms associated therewith be completely eliminated. In some embodiments, the effect is therapeutic, i.e., without limitation, the effect partially or completely reduces, diminishes, abrogates, abates, alleviates, decreases the intensity of, or cures a disease and/or adverse symptom attributable to the disease. In some embodiments, the effect is preventative, i.e., the effect protects or prevents an occurrence or reoccurrence of a disease or condition. To this end, the presently disclosed methods comprise administering a therapeutically effective amount of a compositions as described herein. In one embodiment, the invention provides for the treatment of HBV infection.

[0151] By “uracil glycosylase inhibitor” or “UGI” is meant an agent that inhibits the uracil-excision repair system. Base editors comprising a cytidine deaminase convert cytosine to uracil, which is then converted to thymine through DNA replication or repair. Including an inhibitor of uracil DNA glycosylase (UGI) in the base editor prevents base excision repair which changes the U back to a C. An exemplary UGI comprises an amino acid sequence as follows: >splP14739IUNGI_BPPB2 Uracil-DNA glycosylase inhibitor

(SEQ ID NO: 231)
MTNLSDIIEKETGKQLVIQESILMLPEEVEEVIGNKPESDILVHTAYDE
STDENVMLLTSDAPEYKPWALVIQDSNGENKIKML.

[0152] Ranges provided herein are understood to be shorthand for all of the values within the range. For example, a range of 1 to 50 is understood to include any number, combination of numbers, or sub-range from the group consisting 1, 2, 3, 4, 5, 6, 7, 8, 9, 10, 11, 12, 13, 14, 15, 16, 17, 18, 19, 20, 21, 22, 23, 24, 25, 26, 27, 28, 29, 30, 31, 32, 33, 34, 35, 36, 37, 38, 39, 40, 41, 42, 43, 44, 45, 46, 47, 48, 49, or 50.

[0153] The recitation of a listing of chemical groups in any definition of a variable herein includes definitions of that variable as any single group or combination of listed groups. The recitation of an embodiment for a variable or aspect herein includes that embodiment as any single embodiment or in combination with any other embodiments or portions thereof.

[0154] All terms are intended to be understood as they would be understood by a person skilled in the art. Unless defined otherwise, all technical and scientific terms used herein have the same meaning as commonly understood by one of ordinary skill in the art to which the disclosure pertains

[0155] In this application, the use of the singular includes the plural unless specifically stated otherwise. It must be noted that, as used in the specification, the singular forms “a,” “an” and “the” include plural referents unless the context clearly dictates otherwise. In this application, the use of “or” means “and/or” unless stated otherwise. Furthermore, use of the term “including” as well as other forms, such as “include”, “includes,” and “included,” is not limiting.

[0156] As used in this specification and claim(s), the words “comprising” (and any form of comprising, such as “comprise” and “comprises”), “having” (and any form of having, such as “have” and “has”), “including” (and any form of including, such as “includes” and “include”) or “containing” (and any form of containing, such as “contains” and “contain”) are inclusive or open-ended and do not exclude additional, unrecited elements or method steps. It is contemplated that any embodiment discussed in this specification can be implemented with respect to any method or composition of the present disclosure, and vice versa. Furthermore, compositions of the present disclosure can be used to achieve methods of the present disclosure.

[0157] The term “about” or “approximately” means within an acceptable error range for the particular value as determined by one of ordinary skill in the art, which will depend in part on how the value is measured or determined, i.e., the limitations of the measurement system. For example, “about” can mean within 1 or more than 1 standard deviation, per the practice in the art. Alternatively, “about” can mean a range of up to 20%, up to 10%, up to 5%, or up to 1% of a given value. Alternatively, particularly with respect to biological systems or processes, the term can mean within an order of magnitude, e.g., within 5-fold, within 2-fold of a value. Where particular values are described in the application and claims, unless otherwise stated, the term “about” means within an acceptable error range for the particular value should be assumed.

[0158] Reference in the specification to “some embodiments,” “an embodiment,” “one embodiment” or “other embodiments” means that a particular feature, structure, or characteristic described in connection with the embodiments is included in at least some embodiments, but not necessarily all embodiments, of the present disclosures.

### BRIEF DESCRIPTION OF THE DRAWINGS

[0159] FIG. 1 is an illustration showing the partially double-stranded and the overlapping open reading frames (ORFs) for the hepatitis B surface antigen (HBsAg) gene, the polymerase gene, the protein X gene, and the core gene. The HBsAg gene comprises ORF PreS1, ORF PreS2, and ORF S, which encode the large, middle, and small surface proteins, respectively. ORF core and Pre C encode capsid proteins.

[0160] FIG. 2 is an illustration depicting the HBV life cycle. The term “ER” denotes endoplasmic reticulum. The term “HBsAg” denotes hepatitis B surface antigen. “HBx transcriptional activator” is an HBV-specific transcriptional activator of polymerase II and III promoters.

[0161] FIGS. 3A and 3B present a map and a presentation slide. FIG. 3A is a map of the geographic distribution of hepatitis B virus genotypes worldwide. FIG. 3B provides a summary of a base editing strategies for introducing stop codons in viral genes and for generating abasic sites to treat chronic HBV.

[0162] FIG. 4 provides a bar graph presenting % A to G editing efficiencies for the indicated guide RNA sequences used in combination with the indicated base editors. The HEK293 lenti HBV system was used and an RNA transfection format. Some of the guide RNA sequences were associated with editing efficiencies of over 50%. The guide RNAs targeted HBV transcriptional elements or introduced missense mutations in HBV genes. Listed on the x-axis are the guide RNA sequences used in combination with the indicated base editors (see Table 1).

[0163] FIGS. 5A-5C provide bar graphs showing antiviral efficacy of the indicated base editors used in combination with the indicated guide RNAs (listed on x-axis) in the HBV-primary human hepatocytes (HBV-PHH) system. In FIGS. 5A-5C, the term “HBsAG” represents “Hepatitis B surface antigen,” and the term “HBeAg” represents “Hepatitis B e antigen.” In FIG. 5, the y-axis represents fold-change relative to the no treatment sample.

[0164] FIG. 6 provides a schematic diagram outlining an experimental procedure for a functional gRNA screen in HBV-infected HepG2-NTCP cells.

[0165] FIG. 7 provides a schematic map of the HBV genome. The genome map is annotated to indicate the location of base edits associated with gRNA37 and gRNA40 used in combination with BE4.

[0166] FIG. 8 provides a collection of bar graphs showing the results of a functional gRNA screen in HBV-infected HepG2pNTCP cells. Two lead gRNAs were identified targeting HBsAg and Core genes (i.e., gRNA37 and gRNA40). The guide gRNA37 (Stop-S) was associated with a reduction in HBsAg and gRNA40 (Stop-PreCore) was associated with a reduction in HBeAg. The guide RNAs gRNA37 and gRNA40 both were associated with a lowering of the total HBV DNA and 3.5 kb RNA levels. Listed on the x-axis are the gRNAs used in combination with BE4 (i.e., gRNA12, gRNA37, gRNA19, gRNA190, and gRNA40). The negative control (−) was untreated cells and the control (contr) was gRNA targeting the PCSK9 gene.

[0167] FIG. 9 provides a collection of bar graphs showing that multiplexing gRNAs simultaneously reduced respective HBV viral parameters in HepG2-NTCP. Listed on the x-axis are the gRNAs used in combination with BE4 (i.e., gRNA37 and gRNA40). Both gRNA's targeted the same covalently-closed circular DNA strand (cccDNA) and the targeted sequences were spaced by about 1 kb. Multiplexing gRNA37 and gRNA40 reduced HBsAg and HbBeAg, as well as total HBV DNA and 3.5 kb RNA. The base editor used was BE4. The negative control (−) was untreated cells and the control (contr) was gRNA targeting the PCSK9 gene.

[0168] FIG. 10 provides bar graphs showing that base editor systems containing BE4 and the guide RNA(s) carried out cccDNA editing without reducing the level of cccDNA. The negative control (−) was untreated cells and the control (contr) was gRNA targeting the PCSK9 gene.

[0169] FIG. 11 provides a schematic summarizing an experimental protocol for evaluating the impact of lamivudine pretreatment on editing.

[0170] FIG. 12 provides a bar graph showing that pretreatment with lamivudine was associated with increased editing efficiencies. Base editing efficiency was improved by about 20% in HepG2-NTCP cells through pretreatment with lamivudine. High cccDNA editing in the lamivudine pretreated cells suggested that CBE directly targeted cccDNA.

[0171] FIG. 13 provides a set of bar graphs showing that base editing using gRNA37 in combination with gRNA40 (i.e., a combinatorial/multiplex gRNA treatment) combined with lamivudine pretreatment was associated with a robust reduction of Hepatitis B virus (HBV) markers. The negative control (−) was untreated cells and the control (contr) was gRNA targeting the PCSK9 gene.

[0172] FIG. 14 provides a schematic diagram summarizing an experimental protocol for assessing antiviral activity of base editing relative to lamivudine. FIG. 14 lists the HBV parameters that were measured.

[0173] FIG. 15 provides a set of bar graphs demonstrating that base editing using gRNA37 in combination with gRNA40 (i.e., a combinatorial/multiplex gRNA treatment) resulted in a reduction in all HBV viral markers by about 70% to about 80% at day 25 following treatment; whereas, treatment for 8 days with lamivudine (LAM) was not. The negative control (−) was untreated cells and the control (contr) was gRNA targeting the PCSK9 gene.

[0174] FIG. 16 provides a plot presenting a time-course of extracellular HBV DNA levels for the indicated treatments. Base editing prevented rebound in primary hepatocyte co-cultures. HBV rebounded after discontinuation of lamivudine-only treatment. The control gRNA targeted the PCSK9 gene. The “HBV” sample was an untreated sample. There was no observed HBV rebound 2 weeks following the 2^{nd} transfection with base editing reagents. HBV replication was assessed by HBV DNA qPCR in s/n.

[0175] FIG. 17 provides a bar graph showing the individual base editing efficiencies at the sites targeted by gRNA37 and gRNA40 when the two gRNAs were used together in combination with BE4 to edit HBV cccDNA. About 30% editing efficiency was observed at the S antigen site and about 60% editing efficiency was observed at the PreCore gene. These editing efficiencies were sufficient to enable high antiviral efficacy and prevent rebound in primary human hepatocytes (PHH).

[0176] FIG. 18 provides a schematic providing an overview of an experiment evaluating combined treatment with lamivudine and a base editing system comprising BE4 and gRNAs 37 and 40.

[0177] FIG. 19 provides a plot presenting a time-course of extracellular HBV DNA levels for the indicated treatments. The “HBV” sample was an untreated sample. Pretreatment with lamivudine improved editing in primary hepatocytes. Combined treatment with the base editor system and lamivudine prevented HBV rebound. HBV replication was assessed by HBV DNA qPCR in s/n.

[0178] FIG. 20 provides a bar graph showing base editing efficiencies at the sites targeted by gRNA37 and gRNA40. Cells were contacted with BE4 in combination with gRNA37 and gRNA40 and also treated with lamivudine (LAM). Pretreatment with lamivudine improved editing in primary hepatocytes. Control cells (−) were not treated with lamivudine.

[0179] FIG. 21 provides bar graphs showing that base editing in combination with lamivudine treatment in primary hepatocytes resulted in a reduction of all HBV markers by about 70% to about 80%. The designation “HBV” indicates an untreated control.

[0180] FIG. 22 provides a bar graph showing base editing at the sites targeted by gRNA37 and gRNA40. Cells were contacted with BE4, ppApo, or rrA3F in combination with gRNA37 and gRNA40. Use of the ppApo and rrA3F base editors, which have reduced off-target activity and lower non-specific effects, in place of BE4 did not negatively alter base editing efficiency relative to BE4. All of the base editors were associated with comparable editing efficiencies.

[0181] FIG. 23 provides a bar graph showing that contacting cells with the base editor BE4, ppApo, or rrA3F in combination with gRNA37 and gRNA40 resulted in a reduction in HBsAg levels in the HBV-infected cells. Thus, all three base editor systems had antiviral activity. The negative control (HBV) was untreated cells and the control (contr) was gRNA targeting the PCSK9 gene.

[0182] FIGS. 24A-24C provide plots showing in vivo levels of hepatitis B virus (HBV) antigens measured in a replication-competent HBVcircle mouse model (n=5) following an injection at day 1 and, in some instances as indicated in the figure, another injection at day 14 of lipid nanoparticles containing a polynucleotide encoding BE4 and the guide RNAs gRNA37 and gRNA40. FIG. 24A plots mean % HBsAg as IU/ml over time. FIG. 24B plots HBeAg as PEI (Paul Elrich Institut international standard serum) U/ml over time. FIG. 24C plots HBV DNA as copies/ml over time. In FIGS. 24A-24C, the term “HM” refers to gRNA37-HM and gRNA40-HM containing scaffolds with “heavy modifications” (i.e., heavily modified guide RNAs), the term “SOC” indicates “standard of care,” and “SEM” indicates “standard error of the mean.” In FIGS. 24A-24C, “1×” indicates an injection only at day 1 (“LNP-1^{st} inj.) and “2×” indicates injections at days 1 (“LNP-1′^{st} inj.”) and 14 (“LNP-1^{st} inj.”).

[0183] FIGS. 25A-25C provide plots showing in vivo levels of hepatitis B virus (HBV) antigens measured in a replication-competent HBVcircle mouse model (n=5) following an injection at day 1 and, in some instances as indicated in the figure, another injection at day 14 of lipid nanoparticles containing a polynucleotide encoding BE4 and the guide RNAs gRNA37 and gRNA40. FIG. 25A plots mean % HBsAg as IU/ml over time. FIG. 25B plots HBeAg as PEI (Paul Elrich Institut international standard serum) U/ml over time. FIG. 25C plots HBV DNA as copies/ml over time. In FIGS. 25A-25C, the term “HM” refers to gRNA37-HM and gRNA40-HM containing scaffold with “heavy modifications” (i.e., heavy modification guides RNAs), the term “ETV” indicates “Entecavir,” and “SD” indicates “standard deviation.” In FIGS. 25A-25C, “1×” indicates an injection only at day 1 (“LNP-1^{st} inj.) and “2×” indicates injections at days 1 (“LNP-1^{st} inj.”) and 14 (“LNP 2^{nd} inj.”).

[0184] FIGS. 26A and 26B provide schematics describing a strategy for gRNA selection and screening. This strategy involves targeting conserved HBV regions with a focus on genotype D, which is most prevalent worldwide, and for which both cellular and animal models exist. In silico gRNA selection was based on the gRNA's potential to silence HBV genes. 100 gRNAs introducing stop codons in viral genes (NGG, NGA, NNNRRT PAMs) were designed. 24 conserved gRNAs were predicted to introduce missense mutations into the HBV genome. The final step involved detecting editing in an Hek293-Lenti-HBV cell line.

[0185] FIGS. 27A-27D show that base editing prevents HBV rebound in primary human hepatocytes (PHH). FIG. 27A provides a schematic showing an experimental schedule used for PHH. FIG. 27B is a graph showing HBV replication assessed by HBV DNA qPCR in PHH supernatant at different days post-transfection. Discontinuation of 3TC leads to HBV rebound, while base editing prevents this rebound. FIG. 27C is a graph showing that base editing leads to the efficient reduction of the HBsAg, HBeAg, 3.5 kbRNA, and HBV DNA, and further improves HBV replication inhibition in PHH. FIG. 27D is a graph showing ˜30% editing of S antigen and ˜60% editing of a PreCore gene was sufficient to enable high antiviral efficacy and prevent rebound in PHH.

[0186] FIGS. 28A-28D show that Multiplexing two lead gRNAs reduces HBV parameters in hepatoma cell line (HepG2-NTCP). FIG. 28A shows an Experimental schedule. FIG. 28B includes a number of graphs showing that base editing leads to the efficient reduction of viral extracellular (HBsAg, HBeAg) as well as intracellular (3.5 kbRNA, and HBV DNA) parameters FIG. 28C provides a series of graphs showing that results observed for HBsAg, HBeAg and 3.5 kbRNA upon 3TC treatment. FIG. 28D shows that an gRNA B+gRNA H combination also inhibited all HBs isoforms as observed in Western blotting.

[0187] FIGS. 29A-29C show that Base editing reduced HBs from naturally integrated HBV. FIG. 29A provides an experimental protocol used for PLC/PRF5 cells. FIG. 29B is a graph showing that extracellular HBs Ag levels were determined by ELISA at 6^{h} day post-transfection of BE4 mRNA and gRNA B*. FIG. 29C is a graph showing that ˜50% editing of S antigen site was sufficient to enable robust reduction of HBs Ag.

[0188] FIGS. 30A and 30B shows that the base editor functions through cccDNA editing without reducing cccDNA level. FIG. 30A is a graph. cccDNA levels were assessed by qPCR on the DNA samples pretreated with ExoI/III to eliminate viral replicative intermediates. No cccDNA reduction was observed upon base editing by gRNA B+gRNA H in absence or presence of 3TC. FIG. 30B is graph showing functional editing assessed by NGS on cccDNA enriched samples. Higher editing efficiency was detected in the presence of 3TC.

[0189] FIGS. 31A-31E shows that multiplexing two gRNAs with BE4 base editor simultaneously reduced HBV viral parameters in HepG2-NTCP. FIG. 31A provides a series of graphs showing that gase editing leads to the efficient reduction of viral extracellular (HBsAg, HBeAg), as well as intracellular (3.5 kbRNA, and HBV DNA) parameters relative to a control sample treated with base editing reagents targeting the unrelated PCSK9 gene. BE4/gRNAs(S1+C2) treatment inhibited all HBs isoforms, as observed in Western blotting. FIG. 31B provides an experimental schedule in case of pretreatment with lamivudine. FIG. 31C shows that combinatorial treatment with lamivudine lead to the robust reduction of HBV viral markers, similarly to the results shown in panel A. FIG. 31D is a graph showing that base editing does not reduce cccDNA level in HepG2-NTCP. FIG. 31E shows that pretreatment with Lamivudine increased base editing rates by 20% in HepG2-NTCP. Without intending to be bound by theory high cccDNA editing in Lamivudine pretreated conditions indicates that CBE likely directly targets cccDNA.

[0190] FIGS. 32A-32C show that base editing prevents viral rebound in PHH. FIG. 32A is a graph showing HBV replication assessed by HBV DNA qPCR in PHH supernatant. Discontinuation of lamivudine lead to HBV rebound, while base editing prevented viral rebound. FIG. 32B includes four graphs showing that base editing lead to the efficient reduction of the HBsAg, HBeAg, 3.5 kbRNA, and HBV DNA. FIG. 32C is a graph showing ˜55% editing S antigen and ˜80% Editing PreCore gene sufficient to enable high antiviral efficacy and prevent rebound in PHH.

[0191] FIG. 33A-33C show that LNP-mediated delivery of BE4 mRNA and gRNAs S1/C2 lead to sustained reduction of viral markers in HBV minicircle model. FIG. 33A is a graph showing that there was a >2 log mean HBsAg reduction. Significantly, 5/9 mice showed HBsAg reduction below the limit of detection. FIG. 33B is a graph showing that HBV rebounds in entecavir treated group (positive control). There was a >3 log sustained reduction in serum HBV DNA in groups treated with base editing. No HBV rebound was observed in the base edited group. FIG. 33C shows a loss of HBeAg expression in all mice below the limit of detection two weeks after the 1^{st} LNP injection. Data represented as mean+/−SEM, n=4 or 5 per group.

[0192] FIGS. 34A and 34B are graphs showing that BE4 in combination with gRNA EMSbeam12 with spacer sequence SEQ ID NO. 578 and MSPbeam37-PLC with spacer sequence SEQ ID NO. 10834 edited the naturally integrated HBV genome present in the Alexander hepatoma cell line, PLC/PRF/5 (FIG. 34A) and this reduced HBsAg secretion (FIG. 34B). Also included are protospacer sequences: MSPbeam37 protospacer corresponds to SEQ ID NO. 508; MSPbeam37-PLC protospacer (SEQ ID NO. 10833) includes a single nucleobase change relative to SEQ ID NO. 508.

[0193] FIG. 35 provides a schematic showing an experimental design for evaluating base editing in HepG2.2.15 cells in vitro with and without pretreatment with lamivudine (LAM). In FIG. 35, “DO,” “D1,” etc. represent days 0, 1, etc. following commencement of the experiment, “SN” indicates “supernatant,” and “6dpt” indicates “six (6) days post-transduction.” FIGS. 36A and 36B provide bar graphs showing HBsAg and HBeAg polypeptide levels in HepG2.2.15 cells following base editing using a BE4 base editor in combination with the guides gRNA37 (g37) or gRNA12 (g12) (for base-editing to reduce expression of HBsAg), and/or in combination with the guide gRNA40 (g40) (for base-editing to reduce expression of HBeAg). As a control, cells were contacted with the BE4 base editor in combination with a guide targeting the PCSK9 gene. Cells were base edited with and without pre-treatment with lamivudine (LAM). FIG. 36A shows HBsAg expression levels in HepG2.2.15 cells edited with and without pre-treatment with LAM using the BE4 base editor in combination with the indicated guides. FIG. 36B shows HBeAg expression levels in HepG2.2.15 cells base edited with and without pre-treatment with LAM using the BE4 base editor in combination with the indicated guides. Expression levels were compared using ANOVA/non-parametric test/no matching pair/multiple comparisons to PCSK9.

### DETAILED DESCRIPTION OF THE INVENTION OF THE DISCLOSURE

[0194] The invention of the disclosure features compositions and methods for editing the HBV genome. For example, the compositions contemplated herein can, in some embodiments, include a base editor a guide nucleic acid that targets a particular nucleotide in an HBV gene. In some embodiments, the editing introduces a premature stop codon in the coding sequence of one of the viral proteins. In another embodiment, the editing introduces one or more substitutions (e.g., a missense mutation) in the coding sequence of one or more HBV proteins. In an embodiment, the editing alters a nucleobase in a transcription element (e.g., polyA site, enhancer, or promoter).

[0195] Recent studies have shown that a newer generation of ABEs (e.g., ABE8) are able to induce higher editing rates. Further, they have lower gRNA-independent off-target editing relative to the early generation cytidine base editors (CBEs), and thus are of interest as potential therapeutic approaches. ABEs do not enable generation of stop codons, but they allow targeting AT-rich regions in the HBV genomes.

[0196] The use of base editing to treat HBV advantageously prevents HBV rebound by safely introducing permanent mutations in cccDNA and irreversibly silences HBsAg expression from the integrated HBV DNA without DSBs.

[0197] As described in more detail below, the present disclosure provides for targeting the established HBV covalently closed circular DNA (cccDNA) pool using cytosine base editors (CBEs, C to T conversions). Infected HepG2-NTCP cells and long-term primary human hepatocyte cultures (PHHs) were co-transfected with selected HBV-targeting gRNAs and mRNA encoding a CBE. Base editing efficiency was evaluated by DNA amplicon sequencing and the consequence of base editing on viral replication was determined by analyzing different viral parameters. Without affecting cccDNA integrity, base editing introduced non-sense mutations in HBs or HBe/HBc open reading frames (ORFs) and efficiently inhibited release of total HBV DNA and HBs/HBe antigens. Further, base editing rates remained high in the context of pretreatment with nucleoside analogs (NAs), which reduced levels of HBV DNA replicative intermediates, indicating that CBEs can directly target cccDNA. Multiplexing two gRNAs with CBE led to a greater reduction of HBsAg, HBeAg, total HBV DNA and 3.5 kb viral pregenomic RNA. Importantly, dual gRNA/CBE treatment prevented HBV rebound. Altogether, these results show that CBEs can directly target cccDNA and generate non-sense mutations in HBs and HBe/HBc ORFs that interfere with HBV replication. Moreover, these effects are sustained after CBE degradation, indicating permanent functional changes in HBV cccDNA.

Targeting cccDNA Transcriptional Activity Using Base Editing

[0198] Regions involved in cccDNA transcriptional activity are AT-rich regions and a surrogate to cccDNA degradation for an HBV cure is the permanent disruption of cccDNA transcriptional activity, which is currently unachievable.

[0199] One example of a region involved in cccDNA transcriptional activity is the polyadenylation signal (PAS), which is unique for all the HBV viral RNAs and serves also as a regulatory element (TATA box). Targeting this region in cccDNA can destabilize all viral RNA species, including its genomic component pgRNA and lead to cccDNA silencing.

[0200] As described in the Examples provided herein, sgRNAs were identified through in-silico analyses that target regulatory regions in cccDNA (e.g., Enhancer I, Enhancer II, Basal Core promoter, Cryptic and canonical polyadenylation signals (PAS), S and X genes promoters). Over 250 sgRNAs were identified, and these candidates were curated and several candidates with high in silico predicted efficiency were tested in a Hek293-lentiHBV system.

[0201] Some aspects of the present disclosure, as described further in the Examples, include selecting highly conserved ABE gRNAs predicted to introduce missense mutations in HBV genes. For example, gRNAs were selected based on the high conservation across HBV genotypes, with a focus on genotypes D and A. High sequence conservation allows for targeting of a wider patient population and also is necessary to avoid appearance of viral mutations that would enable HBV virus to escape base editing treatment. Another example of selection criteria was ability of the gRNAs to generate edits in the HBV genome that would lead to a missense mutation. In silico analysis was performed for amino acids changes generated by the base editing reagents gRNAs were selected that would generate missense amino acid changes with sequences rarely detected in naturally occurring HBV genotypes (<0.05% frequency aa change). This way the likelihood that a gRNAs would introduce a mutation that led to a disruption of the HBV protein/genome was increased.

### HBV Genome

[0202] The HBV genome is about 3.2 kb of partially double-stranded DNA and open read frames (ORFs) encoding seven proteins. Referring to FIG. 1, the open reading frame (ORF) P encodes the viral polymerase. The ORF C/PreC encodes capsid proteins. ORF PreS1, ORF PreS2, and ORF S encode large (L), middle (M) and small (S) surface proteins, respectively. ORF X encodes the secretary X protein.

[0203] The partially double-stranded HBV genome is converted by host factors to covalently closed circular DNA (cccDNA). The cccDNA is transcribed by a host RNA polymerase to produce viral mRNA including pre-genomic RNA (pgRNA). pgRNA is reversed transcribed by the HBV polymerase into genomic HBV DNA that can be converted into cccDNA, packaged into virions, or integrated into the host cell's genome (FIG. 2). cccDNA, a key component of the HBV life cycle, is a stable molecule responsible for chronic HBV infection. Editing of the HBV genome can disrupt the formation of cccDNA, thereby reducing the pathogenicity of the virus.

[0204] There are ten different HBV genotypes (A-J) (FIG. 3A). A “genotype” is characterized by <92% sequence identity with any other genome, and a sub-genotype is characterized by <96 to 92% sequence identity. HBV of genotype D is the most prevalent in the United States (FIG. 3A). Research models of HBV genotype D are available including viral stocks (e.g., genotype D, subgenotype ayw (Imquest)) and mouse models (e.g., humanized mouse model (Phoenixbio).

### Editing of Target Genes

[0205] The invention of the disclosure provides methods and compositions that target HBV ORFs for editing. These compositions can comprise a nucleobase editor having a Cas9 or other nucleic acid programmable DNA binding protein domain and an adenosine or cytosine deaminase domain. In some embodiments, the base editor introduces one or more alterations into an HBV ORF. In some embodiments, the alteration results in a mutation in a conserved portion of an HBV protein. In particular embodiments, the alteration introduces one or more stop codons. Throughout the specification, the introduction of a stop codon, resulting in the premature termination of the protein is represented by the amino acid symbol, the amino acid position, and the term STOP (e.g., R87STOP indicates that the codon encoding Arginine at amino acid position 87 is replaced by a Stop codon). Advantageously, the methods of the present invention do not introduce double stranded breaks in the HBV genome. The invention provides strategies for using base editing to treat chronic HBV (FIG. 3B). Introducing stop condons into viral genes using the methods and compositions described herein can be accomplished without generating double strand breaks, thereby eliminating or reducing the risk of cutting host genetic material after HBV integrates into the host's genome. Additionally, the compositions can employ a deaminase that is a natural HBV antiviral restriction factor. For example, inducing APOBEC cytidine deaminases with interferon alpha or Lymphotoxin 0 receptor (LTBR) promotes abasic site formation and cccDNA degradation (FIG. 3B). Furthermore, using a base editor without uracil glycosylase inhibitor domains can target cellular uracil glycosylase to cccDNA and promote its degradation.

[0206] In embodiments HBV ORFs are edited using a base editor comprising an adenosine deaminase (i.e., an adenosine base editor (ABE)). ABE's have several advantages including robust on-target editing and low gRNA-independent off-target editing relative to first generation rAPOBEC1-based CBEs. ABE's do not induce a uracil N-glycosylase (UNG) response. A>I cccDNA deamination has not been described for HBV. ABE's can be used to edit the polymerase active site and/or cccDNA transcription sites including the RNA polyadenylation site TATAAA common to HBV transcripts. Vital regions involved in cccDNA transcriptional activity are AT-rich regions and a surrogate to cccDNA degradation.

[0207] In some aspects, methods and compositions are provided for editing HBV cccDNA with a base editor comprising a cytidine deaminase or adenosine deaminase domain. Exemplary guide RNAs are provided in the following Table 1. Further exemplary guide RNAs include those guide RNAs containing spacer sequences provided in any of Tables 1, 2A, 2B, and/or 2C or listed in the Sequence Listing (e.g., at SEQ ID NOs: 3105-5485 and 8220-10830). In various embodiments, multiple guide RNAs can be administered to a subject or cell simultaneously, optionally in combination with one or more nucleobase editor polypeptides. In embodiments, the multiple guide RNAs include 2, 3, 4, 5, 6, 7, 8, 9, 10, or more guides, optionally wherein the guide RNAs are selected from two or more of cas12b-4, cas12b-5, cas12b-11, cas12b-17, cas12b-30, cas12b-42, cas12b-100, cas12b-147, cas12b-154, cas12b-35, cas12b-124, cas12b-127, and cas12b-122b (see Table 1). In embodiments, the multiple guide RNAs administered to a subject or cell contain two guide RNAs (e.g., gRNA37 and gRNA40, see Table 1). The guides can be administered simultaneously or sequentially, optionally with one or more nucleobase editor polypeptide(s) (e.g., a base editor(s) encoded by an mRNA molecule(s)). Non-limiting examples of spacer sequences suitable for use in guide RNA molecules of the present disclosure include any spacer sequence targeting any portion of a Hepatitis B virus genome. Such spacer sequences can be designed and selected using methods available to the skilled practitioner (e.g., the design of gRNAs targeting a particular sequence is available from Invitrogen as a commercial service). Various strategies can be used for gRNA selection including, as non-limiting examples, 1) targeting HBV transcription elements, and 2) selecting highly conserved ABE gRNAs predicted to introduce missense mutations in HBV genes. In embodiments, the guide RNAs can be used to target a base editor for introduction of a missense mutation into an HBV gene (e.g., cas12b-4, cas12b-5, cas12b-11, cas12b-17, cas12b-30, cas12b-42, cas12b-100, cas12b-147, or cas12b-154). The guide RNAs listed in Table 1 or any guide RNA comprising a spacer sequence listed in Table 2A, Table 2B, Table 2C, or listed among SEQ ID NOs: 3105-5485 and 8220-10830 or anywhere in the Sequence Listing can also be used for targeting a base editor for altering a nucleobase at a transcription site (e.g., cas12b-35, cas12b-124, cas12b-127, or cas12b-122b). Transcription sites that can be targeted for base editing by the guide RNAs of Table 1 or any guide RNA comprising a spacer sequence listed in Table 2A, Table 2B, Table 2C, or listed anywhere in the sequence listing (e.g., among SEQ ID NOs: 3105-5485 and 8220-10830) include enhancer II box A (e.g., cas12b-35), enhancer I (e.g., cas12b-124 or cas12b-127), and the HBX promoter (e.g., cas12b-122b). Non-limiting examples of transcription sites include basal core promoter (BCP), enhancer I, enhancer II, HBV polyA site, HBX promoter, and S promoter-CCAATC-region II. The guide RNAs of the present invention can be used in combination with any base editor (e.g., Cas12b-ABE (ABE-bhCas12b); SEQ ID NO: 418). The base editor can target the PAM sequences listed in Table 2A or Table 2B below (e.g., RTTN sequences).

[0208] In embodiments two or more guide RNAs are introduced to a subject, optionally simultaneously. In embodiments, the two or more guide RNAs include cas12b-5 and cas12b-4; cas12b-1l and cas12b-4; cas12b-17 and cas12b-4; cas12b-30 and cas12b-4; cas12b-42 and cas12b-4; cas12b-100 and cas12b-4; cas12b-147 and cas12b-4; cas12b-154 and cas12b-4; cas12b-35 and cas12b-4; cas12b-124 and cas12b-4; cas12b-127 and cas12b-4; cas12b-122b and cas12b-4; cas12b-1l and cas12b-5; cas12b-17 and cas12b-5; cas12b-30 and cas12b-5; cas12b-42 and cas12b-5; cas12b-100 and cas12b-5; cas12b-147 and cas12b-5; cas12b-154 and cas12b-5; cas12b-35 and cas12b-5; cas12b-124 and cas12b-5; cas12b-127 and cas12b-5; cas12b-122b and cas12b-5; cas12b-17 and cas12b-11; cas12b-30 and cas12b-11; cas12b-42 and cas12b-11; cas12b-100 and cas12b-11; cas12b-147 and cas12b-11; cas12b-154 and cas12b-11; cas12b-35 and cas12b-11; cas12b-124 and cas12b-11; cas12b-127 and cas12b-11; cas12b-122b and cas12b-11; cas12b-30 and cas12b-17; cas12b-42 and cas12b-17; cas12b-100 and cas12b-17; cas12b-147 and cas12b-17; cas12b-154 and cas12b-17; cas12b-35 and cas12b-17; cas12b-124 and cas12b-17; cas12b-127 and cas12b-17; cas12b-122b and cas12b-17; cas12b-42 and cas12b-30; cas12b-100 and cas12b-30; cas12b-147 and cas12b-30; cas12b-154 and cas12b-30; cas12b-35 and cas12b-30; cas12b-124 and cas12b-30; cas12b-127 and cas12b-30; cas12b-122b and cas12b-30; cas12b-100 and cas12b-42; cas12b-147 and cas12b-42; cas12b-154 and cas12b-42; cas12b-35 and cas12b-42; cas12b-124 and cas12b-42; cas12b-127 and cas12b-42; cas12b-122b and cas12b-42; cas12b-147 and cas12b-100; cas12b-154 and cas12b-100; cas12b-35 and cas12b-100; cas12b-124 and cas12b-100; cas12b-127 and cas12b-100; cas12b-122b and cas12b-100; cas12b-154 and cas12b-147; cas12b-35 and cas12b-147; cas12b-124 and cas12b-147; cas12b-127 and cas12b-147; cas12b-122b and cas12b-147; cas12b-35 and cas12b-154; cas12b-124 and cas12b-154; cas12b-127 and cas12b-154; cas12b-122b and cas12b-154; cas12b-124 and cas12b-35; cas12b-127 and cas12b-35; cas12b-122b and cas12b-35; cas12b-127 and cas12b-124; cas12b-122b and cas12b-124; or cas12b-122b and cas12b-127 (See Table 1).

TABLE 1
Guide RNAs

| | SEQ ID | |
|---|---|---|
| Guide ID | NO | gRNA sequence |
| cas12b-4 | 379 | mG*mU*mU*CUGUCUUUUGGUCAGGACAACCGUCUAGCUAUAAGUGCUGCAGGGU |
| | | GUGAGAAACUCCUAUUGCUGGACGAUGUCUCUUACGAGGCAUUAGCAC |
| | | ACAAGAAUCCUCACAAUACC |
| cas12b-5 | 380 | mG*mU*mU*CUGUCUUUUGGUCAGGACAACCGUCUAGCUAUAAGUGCUGCAGGGU |
| | | GUGAGAAACUCCUAUUGCUGGACGAUGUCUCUUACGAGGCAUUAGCAC |
| | | UCGCUGGAUGUGUCUGCGGC |
| cas12b-11 | 381 | mG*mU*mU*CUGUCUUUUGGUCAGGACAACCGUCUAGCUAUAAGUGCUGCAGGGU |
| | | GUGAGAAACUCCUAUUGCUGGACGAUGUCUCUUACGAGGCAUUAGCAC |
| | | CACCUGUAUUCCCAUCCCAU |
| cas12b-17 | 382 | mG*mU*mU*CUGUCUUUUGGUCAGGACAACCGUCUAGCUAUAAGUGCUGCAGGGU |
| | | GUGAGAAACUCCUAUUGCUGGACGAUGUCUCUUACGAGGCAUUAGCAC |
| | | GGGGCCAAGUCUGUACAGCA |
| cas12b-30 | 383 | mG*mU*mU*CUGUCUUUUGGUCAGGACAACCGUCUAGCUAUAAGUGCUGCAGGGU |
| | | GUGAGAAACUCCUAUUGCUGGACGAUGUCUCUUACGAGGCAUUAGCAC |
| | | GCUGACGCAACCCCCACUGG |
| cas12b-42 | 384 | mG*mU*mU*CUGUCUUUUGGUCAGGACAACCGUCUAGCUAUAAGUGCUGCAGGGU |
| | | GUGAGAAACUCCUAUUGCUGGACGAUGUCUCUUACGAGGCAUUAGCAC |
| | | GGAGCUACUGUGGAGUUACU |
| cas12b-100 | 385 | mG*mU*mU*CUGUCUUUUGGUCAGGACAACCGUCUAGCUAUAAGUGCUGCAGGGU |
| | | GUGAGAAACUCCUAUUGCUGGACGAUGUCUCUUACGAGGCAUUAGCAC |
| | | UUCUUCUAGGGGACCUGCCU |
| cas12b-147 | 386 | mG*mU*mU*CUGUCUUUUGGUCAGGACAACCGUCUAGCUAUAAGUGCUGCAGGGU |
| | | GUGAGAAACUCCUAUUGCUGGACGAUGUCUCUUACGAGGCAUUAGCAC |
| | | GAGGACAAACGGGCAACAUA |
| cas12b-154 | 387 | mG*mU*mU*CUGUCUUUUGGUCAGGACAACCGUCUAGCUAUAAGUGCUGCAGGGU |
| | | GUGAGAAACUCCUAUUGCUGGACGAUGUCUCUUACGAGGCAUUAGCAC |
| | | UUGUCAACAAGAAAAACCCC |
| cas12b-35 | 388 | mG*mU*mU*CUGUCUUUUGGUCAGGACAACCGUCUAGCUAUAAGUGCUGCAGGGU |
| | | GUGAGAAACUCCUAUUGCUGGACGAUGUCUCUUACGAGGCAUUAGCAC |
| | | CCCAAGGUCUUACAUAAGAG |
| cas12b-124 | 389 | mG*mU*mU*CUGUCUUUUGGUCAGGACAACCGUCUAGCUAUAAGUGCUGCAGGGU |
| | | GUGAGAAACUCCUAUUGCUGGACGAUGUCUCUUACGAGGCAUUAGCAC |
| | | CCGGGCAACGGGGUAAAGGU |
| cas12b-127 | 390 | mG*mU*mU*CUGUCUUUUGGUCAGGACAACCGUCUAGCUAUAAGUGCUGCAGGGU |
| | | GUGAGAAACUCCUAUUGCUGGACGAUGUCUCUUACGAGGCAUUAGCAC |
| | | ACACAGAAAGGCCUUGUAAG |
| cas12b- | 391 | mG*mU*mU*CUGUCUUUUGGUCAGGACAACCGUCUAGCUAUAAGUGCUGCAGGGU |
| 122b | | GUGAGAAACUCCUAUUGCUGGACGAUGUCUCUUACGAGGCAUUAGCAC |
| | | CACGCACGCGCUGAUGGCCC |
| E12 | 419 | mG*mA*mC*UUCUCUCAAUUUUCUAGGUUUUAGAGCUAGAAAUAGCAAGU |
| (gRNA12) | | UAAAAUAAGGCUAGUCCGUUAUCAACUUGAAAAAGUGGCACCGAGUCGGU |
| | | GCUmU*mU*mU* |
| M52 | 420 | mU*mC*mA*AUCCCAACAAGGACACCGUUUUAGAGCUAGAAAUAGCAAGU |
| (gRNA52) | | UAAAAUAAGGCUAGUCCGUUAUCAACUUGAAAAAGUGGCACCGAGUCGGU |
| | | GCUmU*mU*mU* |
| E20 | 421 | mU*mC*mC*UCUGCCGAUCCAUACUGGUUUUAGAGCUAGAAAUAGCAAGU |
| (gRNA20) | | UAAAAUAAGGCUAGUCCGUUAUCAACUUGAAAAAGUGGCACCGAGUCGGU |
| | | GCUmU*mU*mU* |
| M40 | 422 | mC*mC*mA*UGCCCCAAAGCCACCCAGUUUUAGAGCUAGAAAUAGCAAGU |
| (gRNA40) | | UAAAAUAAGGCUAGUCCGUUAUCAACUUGAAAAAGUGGCACCGAGUCGGU |
| | | GCUmU*mU*mU* |
| M190 | 423 | mG*mC*mU*GCCAACUGGAUCCUGCGGUUUUAGAGCUAGAAAUAGCAAGU |
| (gRNA190) | | UAAAAUAAGGCUAGUCCGUUAUCAACUUGAAAAAGUGGCACCGAGUCGGU |
| | | GCUmU*mU*mU* |
| M37 | 424 | mG*mA*mA*AGCCCAGGAUGAUGGGAGUUUUAGAGCUAGAAAUAGCAAGU |
| (gRNA37) | | UAAAAUAAGGCUAGUCCGUUAUCAACUUGAAAAAGUGGCACCGAGUCGGU |
| | | GCUmU*mU*mU* |
| E19 | 425 | mU*mC*mC*GCAGUAUGGAUCGGCAGGUUUUAGAGCUAGAAAUAGCAAGU |
| (gRNA19) | | UAAAAUAAGGCUAGUCCGUUAUCAACUUGAAAAAGUGGCACCGAGUCGGU |
| | | GCUmU*mU*mU* |
| G-38 | 5486 | mA*mG*mA*AAGGCCUUGUAAGUUGG |
| | | GUUUUAGAGCUAGAAAUAGCAAGUUAAAAUAAGGCUAGUCCGUUAUCAAC |
| | | UUGAAAAAGUGGCACCGAGUCGGUGCmU*mU*mU*U |
| G-231 | 5487 | mU*m*G*mACGCAACCCCCACUGGCU |
| | | GUUUUAGAGCUAGAAAUAGCAAGUUAAAAUAAGGCUAGUCCGUUAUCAAC |
| | | UUGAAAAAGUGGCACCGAGUCGGUGCmU*mU*mU*U |
| G-159 | 5488 | mG*mC*mA*AACACUUGGCACAGACC |
| | | GUUUUAGAGCUAGAAAUAGCAAGUUAAAAUAAGGCUAGUCCGUUAUCAAC |
| | | UUGAAAAAGUGGCACCGAGUCGGUGCmU*mU*mU*U |
| G-255 | 5489 | mU*mU*mU*GCUGACGCAACCCCCAC |
| | | GUUUUAGAGCUAGAAAUAGCAAGUUAAAAUAAGGCUAGUCCGUUAUCAAC |
| | | UUGAAAAAGUGGCACCGAGUCGGUGCmU*mU*mU*U |
| G-140 | 5490 | mG*mA*mC*GCAACCCCCACUGGCUG |
| | | GUUUUAGAGCUAGAAAUAGCAAGUUAAAAUAAGGCUAGUCCGUUAUCAAC |
| | | UUGAAAAAGUGGCACCGAGUCGGUGCmU*mU*mU*U |
| G-15 | 5491 | mA*mA*mC*CCCCACUGGCUGGGGCU |
| | | GUUUUAGAGCUAGAAAUAGCAAGUUAAAAUAAGGCUAGUCCGUUAUCAAC |
| | | UUGAAAAAGUGGCACCGAGUCGGUGCmU*mU*mU*U |
| G-23 | 5492 | mA*mA*mU*GUCAACGACCGACCUUG |
| | | GUUUUAGAGCUAGAAAUAGCAAGUUAAAAUAAGGCUAGUCCGUUAUCAAC |
| | | UUGAAAAAGUGGCACCGAGUCGGUGCmU*mU*mU*U |
| G-234 | 5493 | mU*mG*mC*CCAAGGUCUUACAUAAG |
| | | GUUUUAGAGCUAGAAAUAGCAAGUUAAAAUAAGGCUAGUCCGUUAUCAAC |
| | | UUGAAAAAGUGGCACCGAGUCGGUGCmU*mU*mU*U |
| G-6 | 5494 | mA*mA*mA*GAAUUUGGAGCUACUGU |
| | | GUUUUAGAGCUAGAAAUAGCAAGUUAAAAUAAGGCUAGUCCGUUAUCAAC |
| | | UUGAAAAAGUGGCACCGAGUCGGUGCmU*mU*mU*U |
| G-48 | 5495 | mA*mG*mA*GAGGUGCGCCCCGUGGU |
| | | GUUUUAGAGCUAGAAAUAGCAAGUUAAAAUAAGGCUAGUCCGUUAUCAAC |
| | | UUGAAAAAGUGGCACCGAGUCGGUGCmU*mU*mU*U |
| G-150 | 5496 | mG*mA*mG*GUGAAGCGAAGUGCACA |
| | | GUUUUAGAGCUAGAAAUAGCAAGUUAAAAUAAGGCUAGUCCGUUAUCAAC |
| | | UUGAAAAAGUGGCACCGAGUCGGUGCmU*mU*mU*U |
| G-185 | 5497 | mG*mG*mG*GCGCACCUCUCUUUACG |
| | | GUUUUAGAGCUAGAAAUAGCAAGUUAAAAUAAGGCUAGUCCGUUAUCAAC |
| | | UUGAAAAAGUGGCACCGAGUCGGUGCmU*mU*mU*U |
| G-200 | 5498 | mG*mU*mG*AAAAAGUUGCAUGGUGC |
| | | GUUUUAGAGCUAGAAAUAGCAAGUUAAAAUAAGGCUAGUCCGUUAUCAAC |
| | | UUGAAAAAGUGGCACCGAGUCGGUGCmU*mU*mU*U |
| G- | 5499 | mG*mA*mC*CCUUAUAAAGAAUUUGG |
| polyA_NGC1 | | GUUUUAGAGCUAGAAAUAGCAAGUUAAAAUAAGGCUAGUCCGUUAUCAAC |
| | | UUGAAAAAGUGGCACCGAGUCGGUGCmU*mU*mU*U |
| G- | 5500 | mU*mU*mU*AUAAGGGUCGAUGUCCA |
| polyA_NGC2 | | GUUUUAGAGCUAGAAAUAGCAAGUUAAAAUAAGGCUAGUCCGUUAUCAAC |
| | | UUGAAAAAGUGGCACCGAGUCGGUGCmU*mU*mU*U |
| G-772 | 5501 | mU*mG*mG*CGAUUGGUGGAGGCAGG |
| | | GUUUUAGAGCUAGAAAUAGCAAGUUAAAAUAAGGCUAGUCCGUUAUCAAC |
| | | UUGAAAAAGUGGCACCGAGUCGGUGCmU*mU*mU*U |
| G-221 | 5502 | mC*mA*mC*AGAAAGGCCUUGUAAGU |
| | | GUUUUAGAGCUAGAAAUAGCAAGUUAAAAUAAGGCUAGUCCGUUAUCAAC |
| | | UUGAAAAAGUGGCACCGAGUCGGUGCmU*mU*mU*U |
| G-412 | 5503 | mC*mU*mU*UCUGUGUAAACAAUACC |
| | | GUUUUAGAGCUAGAAAUAGCAAGUUAAAAUAAGGCUAGUCCGUUAUCAAC |
| | | UUGAAAAAGUGGCACCGAGUCGGUGCmU*mU*mU*U |
| G-251 | 5504 | mC*mA*mG*GUAUUGUUUACACAGAA |
| | | GUUUUAGAGCUAGAAAUAGCAAGUUAAAAUAAGGCUAGUCCGUUAUCAAC |
| | | UUGAAAAAGUGGCACCGAGUCGGUGCmU*mU*mU*U |
| G-839 | 5505 | mU*mU*mU*ACCCCGUUGCCCGGCAA |
| | | GUUUUAGAGCUAGAAAUAGCAAGUUAAAAUAAGGCUAGUCCGUUAUCAAC |
| | | UUGAAAAAGUGGCACCGAGUCGGUGCmU*mU*mU*U |
| G-553 | 5506 | mG*mG*mG*CAACGGGGUAAAGGUUC |
| | | GUUUUAGAGCUAGAAAUAGCAAGUUAAAAUAAGGCUAGUCCGUUAUCAAC |
| | | UUGAAAAAGUGGCACCGAGUCGGUGCmU*mU*mU*U |
| G-638 | 5507 | mG*mU*mU*GCCCAAGGUCUUACAUA |
| | | GUUUUAGAGCUAGAAAUAGCAAGUUAAAAUAAGGCUAGUCCGUUAUCAAC |
| | | UUGAAAAAGUGGCACCGAGUCGGUGCmU*mU*mU*U |
| G-845 | 5508 | mU*mU*mU*GAAGUAUGCCUCAAGGU |
| | | GUUUUAGAGCUAGAAAUAGCAAGUUAAAAUAAGGCUAGUCCGUUAUCAAC |
| | | UUGAAAAAGUGGCACCGAGUCGGUGCmU*mU*mU*U |
| G-474 | 5509 | mG*mA*mU*UAAAGGUCUUUGUACUA |
| | | GUUUUAGAGCUAGAAAUAGCAAGUUAAAAUAAGGCUAGUCCGUUAUCAAC |
| | | UUGAAAAAGUGGCACCGAGUCGGUGCmU*mU*mU*U |
| G-804 | 5510 | mU*mU*mA*AAGGUCUUUGUACUAGG |
| | | GUUUUAGAGCUAGAAAUAGCAAGUUAAAAUAAGGCUAGUCCGUUAUCAAC |
| | | UUGAAAAAGUGGCACCGAGUCGGUGCmU*mU*mU*U |
| G-144 | 5511 | mA*mG*mG*AGGCUGUAGGCAUAAAU |
| (EMS3) | | GUUUUAGAGCUAGAAAUAGCAAGUUAAAAUAAGGCUAGUCCGUUAUCAAC |
| | | UUGAAAAAGUGGCACCGAGUCGGUGCmU*mU*mU*U |
| ABE-8 | 5512 | mA*mA*mA*UUGAGAGAAGUCCACCA |
| | | GUUUUAGAGCUAGAAAUAGCAAGUUAAAAUAAGGCUAGUCCGUUAUCAAC |
| | | UUGAAAAAGUGGCACCGAGUCGGUGCmU*mU*mU*U |
| ABE-41 | 5513 | mA*mG*mA*AGAUGAGGCAUAGCAGC |
| | | GUUUUAGAGCUAGAAAUAGCAAGUUAAAAUAAGGCUAGUCCGUUAUCAAC |
| | | UUGAAAAAGUGGCACCGAGUCGGUGCmU*mU*mU*U |
| ABE-85 | 5514 | mC*mA*mC*CACGAGUCUAGACUCUG |
| (MSPbeam36) | | GUUUUAGAGCUAGAAAUAGCAAGUUAAAAUAAGGCUAGUCCGUUAUCAAC |
| | | UUGAAAAAGUGGCACCGAGUCGGUGCmU*mU*mU*U |
| ABE-131 | 5515 | mG*mA*mA*GAACUCCCUCGCCUCGC |
| (EMS11) | | GUUUUAGAGCUAGAAAUAGCAAGUUAAAAUAAGGCUAGUCCGUUAUCAAC |
| | | UUGAAAAAGUGGCACCGAGUCGGUGCmU*mU*mU*U |
| ABE-133 | 5516 | mG*mA*mA*GAUGAGGCAUAGCAGCA |
| | | GUUUUAGAGCUAGAAAUAGCAAGUUAAAAUAAGGCUAGUCCGUUAUCAAC |
| | | UUGAAAAAGUGGCACCGAGUCGGUGCmU*mU*mU*U |
| ABE-142 | 5517 | mG*mA*mG*AAGUCCACCACGAGUCU |
| (MSPbeam66) | | GUUUUAGAGCUAGAAAUAGCAAGUUAAAAUAAGGCUAGUCCGUUAUCAAC |
| | | UUGAAAAAGUGGCACCGAGUCGGUGCmU*mU*mU*U |
| ABE-150 | 5518 | mG*mA*mG*GUGAAGCGAAGUGCACA |
| | | GUUUUAGAGCUAGAAAUAGCAAGUUAAAAUAAGGCUAGUCCGUUAUCAAC |
| | | UUGAAAAAGUGGCACCGAGUCGGUGCmU*mU*mU*U |
| ABE-235 | 5519 | mU*mG*mG*ACUUCUCUCAAUUUUCU |
| (EMS21) | | GUUUUAGAGCUAGAAAUAGCAAGUUAAAAUAAGGCUAGUCCGUUAUCAAC |
| | | UUGAAAAAGUGGCACCGAGUCGGUGCmU*mU*mU*U |
| cas12b-116 | 5520 | mG*mU*mU*CUGUCUUUUGGUCAGGACAACCGUCUAGCUAUAAGUGCUGC |
| | | AGGGUGUGAGAAACUCCUAUUGCUGGACGAUGUCUCUUACGAGGCAUUAG |
| | | CACAGCGCCGACGGGACGUAAAC |
| cas12b-122a | 5521 | mG*mU*mU*CUGUCUUUUGGUCAGGACAACCGUCUAGCUAUAAGUGCUGC |
| | | AGGGUGUGAGAAACUCCUAUUGCUGGACGAUGUCUCUUACGAGGCAUUAG |
| | | CACCGUCAGCAAACACUUGGCAC |
| cas12b-148 | 5522 | mG*mU*mU*CUGUCUUUUGGUCAGGACAACCGUCUAGCUAUAAGUGCUGC |
| | | AGGGUGUGAGAAACUCCUAUUGCUGGACGAUGUCUCUUACGAGGCAUUAG |
| | | CACGAGGACAGGAGGUUGGUGAG |
| cas12b-152 | 5523 | mG*mU*mU*CUGUCUUUUGGUCAGGACAACCGUCUAGCUAUAAGUGCUGC |
| | | AGGGUGUGAGAAACUCCUAUUGCUGGACGAUGUCUCUUACGAGGCAUUAG |
| | | CACAGAGAAGUCCACCACGAGUC |
| cas12b-111 | 5524 | mG*mU*mU*CUGUCUUUUGGUCAGGACAACCGUCUAGCUAUAAGUGCUGC |
| | | AGGGUGUGAGAAACUCCUAUUGCUGGACGAUGUCUCUUACGAGGCAUUAG |
| | | CACUUUAUAAGGGUCGAUGUCCA |
| cas12b-125 | 5525 | mG*mU*mU*CUGUCUUUUGGUCAGGACAACCGUCUAGCUAUAAGUGCUGC |
| | | AGGGUGUGAGAAACUCCUAUUGCUGGACGAUGUCUCUUACGAGGCAUUAG |
| | | CACAGGUAUUGUUUACACAGAAA |
| cas12b-126 | 5526 | mG*mU*mU*CUGUCUUUUGGUCAGGACAACCGUCUAGCUAUAAGUGCUGC |
| | | AGGGUGUGAGAAACUCCUAUUGCUGGACGAUGUCUCUUACGAGGCAUUAG |
| | | CACUUUACACAGAAAGGCCUUGU |
| gRNA37- | 424 | gsasasAGCCCAGGAUGAUGGGAgUUUUAGagcuagaaauagcaaGUUaA |
| HM | | aAuAaggcuaGUccGUUAucAAcuugaaaaagugGcaccgagucggugcu |
| | | sususu |
| gRNA40- | 422 | cscsasUGCCCCAAAGCCACCCAgUUUUAGagcuagaaauagcaaGUUaA |
| HM | | aAuAaggcuaGUccGUUAucAAcuugaaaaagugGcaccgagucggugcu |
| | | sususu |

For all guides except gRNA37-HM and gRNA40-HM, mA*, mC*, mG*, and mU* represent bases with a 2′-O-methyl 3′-phosphorothioate modification. For gRNA37-HM and gRNA-40HM, a, c, u, or g represents bases with a 2′O-methyl (M) modification, and as, cs, us, or gs represents bases with a 2′-O-methyl 3′-phosphorothioate (MS) modification.

[0209] To produce the gene edits described above, cells (e.g., a hepatocyte) are contacted with two or more guide RNAs and a nucleobase editor polypeptide comprising a nucleic acid programmable DNA binding protein (napDNAbp) and a cytidine deamiinase or adenosine deamiinase. In some embodiments, cells to be edited are contacted with at least one nucleic acid, wherein the at least one nucleic acid encodes two or more guide RNAs and a nucleobase editor polypeptide comprising a nucleic acid programmable DNA binding protein (napDNAbp) and a cytidine deaminase. In some embodiments, the gRNA comprises nucleotide analogs (e.g., mA*, mC*, mG*, and/or mU*). These nucleotide analogs can inhibit degradation of the gRNA from cellular processes. Tables 2A-2C provide exemplary target and spacer sequences to be used for gRNAs. Further exemplary target sequences and spacer sequences are provided in the Sequence Listing as SEQ ID NOs: 724-3104 and 5609-8219, and SEQ ID NOs: 3105-5485 and 8220-10830, respectively. The gRNAs can target all or a portion of all HBV genotypes (e.g., A, B, C, D, E, F, G, and/or H). The gRNAs can target over 50%, 55%, 60%, 65%, 70%, 75%, 80%, 85%, 90%, 85%, or all of hepatitis B viruses of a particular genotype or set of genotypes.

[0210] In various embodiments, agRNA (e.g., gRNA37-HM or gRNA4-HM) of the present disclosure contains the following “heavily modified” (HM) scaffold: gUUUUAGagcuagaaauagcaaGUUaAaAuAaggcuaGUccGUUAucAAcuugaaaaagugGcaccgagucg gugcusususu (SEQ ID NO: 317), where “a”, N: “u”, or “g” represents an A, C, U, or G nucleotide containing a 2′O-methyl (M) modification, respectively; and as, cs, us, or gs represent an A, C, U, or G nucleotide containing a 2′-O-methyl 3′-phosphorothioate (MS) modification, respectively. In embodiments, a guide RNA of the present disclosure contains the HM scaffold and a spacer sequence listed in any one of Tables 2A-2C.

TABLE 2A
Exemplary Target Sequences

| | | | | | Location of | | |
|---|---|---|---|---|---|---|---|
| | | | | HBV | Target Site in | | |
| Guide | | gRNA Spacer | PAM | gene | HBV Genome | | |
| ID | Target Sequence | Sequence | Site | targeted | Start | End | Strand |
| cas12b- | ACAAGAATCCTCACA | ACAAGAAUCCUCACA | GTTG | Pol/S | 218 | 242 | + |
| 4 | ATACC (SEQ ID NO: | AUACC (SEQ ID NO: | | | | | |
| | 392) | 405) | | | | | |
| cas12b- | TCGCTGGATGTGTCT | UCGCUGGAUGUGUCU | GTTA | Pol/S | 367 | 391 | + |
| 5 | GCGGC (SEQ ID NO: | GCGGC (SEQ ID | | | | | |
| | 393) | NO: 406) | | | | | |
| cas12b- | CACCTGTATTCCCAT | CACCUGUAUUCCCAU | ATTG | Pol/S | 592 | 616 | + |
| 11 | CCCAT (SEQ ID NO: | CCCAU (SEQ ID NO: | | | | | |
| | 394) | 407) | | | | | |
| cas12b- | GGGGCCAAGTCTGTA | GGGGCCAAGUCUGUA | ATTG | Pol/S | 754 | 778 | + |
| 17 | CAGCA (SEQ ID NO: | CAGCA (SEQ ID NO: | | | | | |
| | 395) | 408) | | | | | |
| cas12b- | GCTGACGCAACCCCC | GCUGACGCAACCCCC | GTTT | Pol | 1183 | 1207 | + |
| 30 | ACTGG (SEQ ID NO: | ACUGG (SEQ ID NO: | | | | | |
| | 396) | 409) | | | | | |
| cas12b- | GGAGCTACTGTGGAG | GGAGCUACUGUGGA | ATTT | Core | 1925 | 1949 | + |
| 42 | TTACT (SEQ ID | GUUACU (SEQ ID | | | | | |
| | NO: (397) | NO: 410) | | | | | |
| cas12b- | TTCTTCTAGGGGACC | UUCUUCUAGGGGACC | GTTC | Pol | 2357 | 2381 | − |
| 100 | TGCCT (SEQ ID NO: | UGCCU (SEQ ID NO: | | | | | |
| | 398) | 411) | | | | | |
| cas12b- | GAGGACAAACGGGC | GAGGACAAACGGGCA | ATTA | Pol/S | 461 | 485 | − |
| 147 | AACATA (SEQ ID NO: | ACAUA (SEQ ID NO: | | | | | |
| | 399) | 412) | | | | | |
| cas12b- | TTGTCAACAAGAAAA | UUGUCAACAAGAAA | ATTC | Pol/S | 206 | 230 | − |
| 154 | ACCCC (SEQ ID NO: | AACCCC (SEQ ID | | | | | |
| | 400) | NO: 413) | | | | | |
| cas12b- | CCCAAGGTCTTACAT | CCCAAGGUCUUACAU | GTTG | X | 1638 | 1662 | + |
| 35 | AAGAG (SEQ ID NO: | AAGAG (SEQ ID NO: | | | | | |
| | 401) | 414) | | | | | |
| cas12b- | CCGGGCAACGGGGTA | CCGGGCAACGGGGUA | GTTG | Pol | 1140 | 1164 | − |
| 124 | AAGGT (SEQ ID NO: | AAGGU (SEQ ID NO: | | | | | |
| | 402) | 415) | | | | | |
| cas12b- | ACACAGAAAGGCCTT | ACACAGAAAGGCCUU | GTTT | Pol | 1107 | 1131 | − |
| 127 | GTAAG (SEQ ID NO: | GUAAG (SEQ ID NO: | | | | | |
| | 403) | 416) | | | | | |
| cas12b- | CACGCACGCGCTGAT | CACGCACGCGCUGAU | GTTC | Pol | 1222 | 1246 | − |
| 122b | GGCCC (SEQ ID NO: | GGCCC (SEQ ID NO: | | | | | |
| | 404) | 417) | | | | | |

“Core” refers to the HBV core protein; “Pol” refers to the HBV polymerase gene; “S” refers to the HBV surface protein; “X” refers to the HBV protein X gene.

TABLE 2B
Exemplary Target Sequences

| | | Target | | Spacer | | HBV |
|---|---|---|---|---|---|---|
| | | SEQ | | SEQ | PAM | gene |
| Guide ID | Target Sequence | ID NO | gRNA Spacer | ID NO | Site | target |
| G-38 | AGAAAGGCCTTGTAAGTTGG | 5527 | AGAAAGGCCUUGUAAGUUGG | 5568 | NGA | Pol |
| G-231 | TGACGCAACCCCCACTGGCT | 5528 | UGACGCAACCCCCACUGGCU | 5569 | NGG | Pol |
| G-159 | GCAAACACTTGGCACAGACC | 5529 | GCAAACACUUGGCACAGACC | 5570 | NGG | Pol |
| G-255 | TTTGCTGACGCAACCCCCAC | 5530 | UUUGCUGACGCAACCCCCAC | 5571 | NGG | Pol |
| G-140 | GACGCAACCCCCACTGGCTG | 5531 | GACGCAACCCCCACUGGCUG | 5572 | NGG | Pol |
| G-15 | AACCCCCACTGGCTGGGGCT | 5532 | AACCCCCACUGGCUGGGGCU | 5573 | NGG | Pol |
| G-23 | AATGTCAACGACCGACCTTG | 5533 | AAUGUCAACGACCGACCUUG | 5574 | NGG | X |
| G-234 | TGCCCAAGGTCTTACATAAG | 5534 | UGCCCAAGGUCUUACAUAAG | 5575 | NGG | X |
| G-6 | AAAGAATTTGGAGCTACTGT | 5535 | AAAGAAUUUGGAGCUACUGU | 5576 | NGA | Core |
| G-48 | AGAGAGGTGCGCCCCGTGGT | 5536 | AGAGAGGUGCGCCCCGUGGU | 5577 | NGG | Pol/X |
| G-150 | GAGGTGAAGCGAAGTGCACA | 5537 | GAGGUGAAGCGAAGUGCACA | 5578 | NGG | Pol/X |
| G-185 | GGGGCGCACCTCTCTTTACG | 5538 | GGGGCGCACCUCUCUUUACG | 5579 | NGG | Pol/X |
| G-200 | GTGAAAAAGTTGCATGGTGC | 5539 | GUGAAAAAGUUGCAUGGUGC | 5580 | NGG | X/Core |
| G- | GACCCTTATAAAGAATTTGG | 5540 | GACCCUUAUAAAGAAUUUGG | 5581 | NGC | Core |
| polyA NGC1 | | | | | | |
| G- | TTTATAAGGGTCGATGTCCA | 5541 | UUUAUAAGGGUCGAUGUCCA | 5582 | NGC | Core |
| polyA NGC2 | | | | | | |
| G-772 | TGGCGATTGGTGGAGGCAGG | 5542 | UGGCGAUUGGUGGAGGCAGG | 5583 | NGG | Pol/S |
| G-221 | CACAGAAAGGCCTTGTAAGT | 5543 | CACAGAAAGGCCUUGUAAGU | 5584 | NGA | Pol |
| G-412 | CTTTCTGTGTAAACAATACC | 5544 | CUUUCUGUGUAAACAAUACC | 5585 | NGG | Pol |
| G-251 | CAGGTATTGTTTACACAGAA | 5545 | CAGGUAUUGUUUACACAGAA | 5586 | NGG | Pol |
| G-839 | TTTACCCCGTTGCCCGGCAA | 5546 | UUUACCCCGUUGCCCGGCAA | 5587 | NGG | Pol |
| G-553 | GGGCAACGGGGTAAAGGTTC | 5547 | GGGCAACGGGGUAAAGGUUC | 5588 | | Pol |
| G-638 | GTTGCCCAAGGTCTTACATA | 5548 | GUUGCCCAAGGUCUUACAUA | 5589 | NGA | X |
| G-845 | TTTGAAGTATGCCTCAAGGT | 5549 | UUUGAAGUAUGCCUCAAGGU | 5590 | NGG | X |
| G-474 | GATTAAAGGTCTTTGTACTA | 5550 | GAUUAAAGGUCUUUGUACUA | 5591 | NGA | X |
| G-804 | TTAAAGGTCTTTGTACTAGG | 5551 | UUAAAGGUCUUUGUACUAGG | 5592 | NGG | X |
| G-144 | AGGAGGCTGTAGGCATAAAT | 5552 | AGGAGGCUGUAGGCAUAAAU | 5593 | NGG | X |
| (EMS3) | | | | | | |
| ABE-8 | AAATTGAGAGAAGTCCACCA | 5553 | AAAUUGAGAGAAGUCCACCA | 5594 | NGA | S/Pol |
| ABE-41 | AGAAGATGAGGCATAGCAGC | 5554 | AGAAGAUGAGGCAUAGCAGC | 5595 | NGG | S/Pol |
| ABE-85 | CACCACGAGTCTAGACTCTG | 5555 | CACCACGAGUCUAGACUCUG | 5596 | NGG | S/pol |
| (MSPbeam36) | | | | | | |
| ABE-131 | GAAGAACTCCCTCGCCTCGC | 5556 | GAAGAACUCCCUCGCCUCGC | 5597 | NGA | Core/Pol |
| (EMS11) | | | | | | |
| ABE-133 | GAAGATGAGGCATAGCAGCA | 5557 | GAAGAUGAGGCAUAGCAGCA | 5598 | NGA | S/Pol |
| ABE-142 | GAGAAGTCCACCACGAGTCT | 5558 | GAGAAGUCCACCACGAGUCU | 5599 | NGA | S/Pol |
| (MSPbeam66) | | | | | | |
| ABE-150 | GAGGTGAAGCGAAGTGCACA | 5559 | GAGGUGAAGCGAAGUGCACA | 5600 | NGG | Pol/X |
| ABE-235 | TGGACTTCTCTCAATTTTCT | 5560 | UGGACUUCUCUCAAUUUUCU | 5601 | NGG | S/Pol |
| (EMS21) | | | | | | |
| cas12b-116 | AGCGCCGACGGGACGTAAAC | 5561 | AGCGCCGACGGGACGUAAAC | 5602 | ATTC | Pol/X |
| cas12b-122a | CGTCAGCAAACACTTGGCAC | 5562 | CGUCAGCAAACACUUGGCAC | 5603 | GTTG | Pol |
| cas12b-148 | GAGGACAGGAGGTTGGTGAG | 5563 | GAGGACAGGAGGUUGGUGAG | 5604 | GTTG | S/Pol |
| cas12b-152 | AGAGAAGTCCACCACGAGTC | 5564 | AGAGAAGUCCACCACGAGUC | 5605 | ATTG | S/Pol |
| cas12b-111 | TTTATAAGGGTCGATGTCCA | 5565 | UUUAUAAGGGUCGAUGUCCA | 5606 | ATTC | X/Core |
| cas12b-125 | AGGTATTGTTTACACAGAAA | 5566 | AGGUAUUGUUUACACAGAAA | 5607 | GTTC | Pol |
| cas12b-126 | TTTACACAGAAAGGCCTTGT | 5567 | UUUACACAGAAAGGCCUUGU | 5608 | ATTG | Pol |

“Core” refers to the HBV core protein; “Pol” refers to the HBV polymerase gene; “S” refers to the HBV surface protein; “X” refers to the HBV protein X gene.

TABLE 2C
Exemplary Target Sequences

| | | Target | | Spacer |
|---|---|---|---|---|
| | | SEQ | | SEQ |
| Guide ID | Target Sequence | ID NO | gRNA Spacer Sequence | ID NO |
| E1 | AAGGCACAGCTTGGAGGCTTG | 426 | AAGGCACAGCUUGGAGGCUUG | 575 |
| E10 | GAACTCCCTCGCCTCGCAGAC | 427 | GAACUCCCUCGCCUCGCAGAC | 576 |
| E11 | GAAGAACTCCCTCGCCTCGC | 428 | GAAGAACUCCCUCGCCUCGC | 577 |
| E12 (gRNA12) | GACTTCTCTCAATTTTCTAG | 429 | GACUUCUCUCAAUUUUCUAG | 578 |
| E14 | GCTGCTATGCCTCATCTTCTT | 430 | GCUGCUAUGCCUCAUCUUCUU | 579 |
| E15 | GGACTTCTCTCAATTTTCTA | 431 | GGACUUCUCUCAAUUUUCUA | 580 |
| E16/M2 | GTCCACCACGAGTCTAGACTC | 432 | GUCCACCACGAGUCUAGACUC | 581 |
| E18 | TAAAACGCCGCAGACACATCC | 433 | UAAAACGCCGCAGACACAUCC | 582 |
| E19 (gRNA19) | TCCGCAGTATGGATCGGCAG | 434 | UCCGCAGUAUGGAUCGGCAG | 583 |
| E2 | ACCAATTTATGCCTACAGCCT | 435 | ACCAAUUUAUGCCUACAGCCU | 584 |
| E20 (gRNA20) | TCCTCTGCCGATCCATACTG | 436 | UCCUCUGCCGAUCCAUACUG | 585 |
| E21 | TGGACTTCTCTCAATTTTCT | 437 | UGGACUUCUCUCAAUUUUCU | 586 |
| E22/M9 | TTCAAGCCTCCAAGCTGTGCC | 438 | UUCAAGCCUCCAAGCUGUGCC | 587 |
| E23 | TTTGCTGACGCAACCCCCAC | 439 | UUUGCUGACGCAACCCCCAC | 588 |
| E24 | TACTAACATTGAGGTTCCCG | 440 | UACUAACAUUGAGGUUCCCG | 589 |
| E3 | AGGAGGCTGTAGGCATAAAT | 441 | AGGAGGCUGUAGGCAUAAAU | 590 |
| E4 | AGGAGTTCCGCAGTATGGAT | 442 | AGGAGUUCCGCAGUAUGGAU | 591 |
| E6 | CAAGGCACAGCTTGGAGGCT | 443 | CAAGGCACAGCUUGGAGGCU | 592 |
| E7 | CCGCAGTATGGATCGGCAGA | 444 | CCGCAGUAUGGAUCGGCAGA | 593 |
| E8 | CCTCTGCCGATCCATACTGC | 445 | CCUCUGCCGAUCCAUACUGC | 594 |
| E9 | CTAGACTCGTGGTGGACTTCT | 446 | CUAGACUCGUGGUGGACUUCU | 595 |
| E95 | CGCCCACCGAATGTTGCCCA | 447 | CGCCCACCGAAUGUUGCCCA | 596 |
| E96 | CTCCTCCCAGTCTTTAAACA | 448 | CUCCUCCCAGUCUUUAAACA | 597 |
| E96 | ACTCCTCCCAGTCTTTAAACA | 449 | ACUCCUCCCAGUCUUUAAACA | 598 |
| M1 | CAATACCGCAGAGTCTAGACT | 450 | CAAUACCGCAGAGUCUAGACU | 599 |
| M1 | AATACCGCAGAGTCTAGACT | 451 | AAUACCGCAGAGUCUAGACU | 600 |
| M10 | CCCCAGCAAAGAATTGCTTGC | 452 | CCCCAGCAAAGAAUUGCUUGC | 601 |
| M10 | CCCAGCAAAGAATTGCTTGC | 453 | CCCAGCAAAGAAUUGCUUGC | 602 |
| M11 | CCCACCCAGGTAGCTAGAGTC | 454 | CCCACCCAGGUAGCUAGAGUC | 603 |
| M11 | CCACCCAGGTAGCTAGAGTC | 455 | CCACCCAGGUAGCUAGAGUC | 604 |
| M12 | GAATCCACACTCCGAAAGACA | 456 | GAAUCCACACUCCGAAAGACA | 605 |
| M12 | AATCCACACTCCGAAAGACA | 457 | AAUCCACACUCCGAAAGACA | 606 |
| M13 | GTCTCAATCGCCGCGTCGCA | 458 | GUCUCAAUCGCCGCGUCGCA | 607 |
| M13 | GGTCTCAATCGCCGCGTCGCA | 459 | GGUCUCAAUCGCCGCGUCGCA | 608 |
| M14 | GAAGATCTCAATCTCGGGAAC | 460 | GAAGAUCUCAAUCUCGGGAAC | 609 |
| M14 | AAGATCTCAATCTCGGGAAC | 461 | AAGAUCUCAAUCUCGGGAAC | 610 |
| M15 | TTTTCCAATGAGGATTAAAG | 462 | UUUUCCAAUGAGGAUUAAAG | 611 |
| M15 | GTTTTCCAATGAGGATTAAAG | 463 | GUUUUCCAAUGAGGAUUAAAG | 612 |
| M16 | TTTACACCAAGACATTATCA | 464 | UUUACACCAAGACAUUAUCA | 613 |
| M16 | ATTTACACCAAGACATTATCA | 465 | AUUUACACCAAGACAUUAUCA | 614 |
| M17 | TGAACAGTTTGTAGGCCCACT | 466 | UGAACAGUUUGUAGGCCCACU | 615 |
| M17 | GAACAGTTTGTAGGCCCACT | 467 | GAACAGUUUGUAGGCCCACU | 616 |
| M18 | GATTGCAATTGATTATGCCTG | 468 | GAUUGCAAUUGAUUAUGCCUG | 617 |
| M18 | ATTGCAATTGATTATGCCTG | 469 | AUUGCAAUUGAUUAUGCCUG | 618 |
| M189 | TGCCAACTGGATCCTGCGCG | 470 | UGCCAACUGGAUCCUGCGCG | 619 |
| M19 | CGCCTTCCATAGAGTGTGTA | 471 | CGCCUUCCAUAGAGUGUGUA | 620 |
| M19 | CCGCCTTCCATAGAGTGTGTA | 472 | CCGCCUUCCAUAGAGUGUGUA | 621 |
| M190 | GCTGCCAACTGGATCCTGCG | 473 | GCUGCCAACUGGAUCCUGCG | 622 |
| (gRNA190) | | | | |
| M191 | CTGCCAACTGGATCCTGCGC | 474 | CUGCCAACUGGAUCCUGCGC | 623 |
| M2 | TCCACCACGAGTCTAGACTC | 475 | UCCACCACGAGUCUAGACUC | 624 |
| M20 | TCCCAAGAATATGGTGACCCA | 476 | UCCCAAGAAUAUGGUGACCCA | 625 |
| M20 | CCCAAGAATATGGTGACCCA | 477 | CCCAAGAAUAUGGUGACCCA | 626 |
| M21 | ACAAGATCTACAGCATGGGG | 478 | ACAAGAUCUACAGCAUGGGG | 627 |
| M21 | AACAAGATCTACAGCATGGGG | 479 | AACAAGAUCUACAGCAUGGGG | 628 |
| M22 | CCAGCCTTCAGAGCAAACACA | 480 | CCAGCCUUCAGAGCAAACACA | 629 |
| M22 | CAGCCTTCAGAGCAAACACA | 481 | CAGCCUUCAGAGCAAACACA | 630 |
| M23 | TTCAGAGCAAACACAGCAAAT | 482 | UUCAGAGCAAACACAGCAAAU | 631 |
| M23 | TCAGAGCAAACACAGCAAAT | 483 | UCAGAGCAAACACAGCAAAU | 632 |
| M24 | TCCCCAATCCTCGAGAAGATT | 484 | UCCCCAAUCCUCGAGAAGAUU | 633 |
| M24 | CCCCAATCCTCGAGAAGATT | 485 | CCCCAAUCCUCGAGAAGAUU | 634 |
| M25 | CCAGGACAAGTTGGAGGACA | 486 | CCAGGACAAGUUGGAGGACA | 635 |
| M25 | ACCAGGACAAGTTGGAGGACA | 487 | ACCAGGACAAGUUGGAGGACA | 636 |
| M26 | TGCTGTACCAAACCTTCGGAC | 488 | UGCUGUACCAAACCUUCGGAC | 637 |
| M26 | GCTGTACCAAACCTTCGGAC | 489 | GCUGUACCAAACCUUCGGAC | 638 |
| M27 | ACCCCATCTCTTTGTTTTGT | 490 | ACCCCAUCUCUUUGUUUUGU | 639 |
| M27 | AACCCCATCTCTTTGTTTTGT | 491 | AACCCCAUCUCUUUGUUUUGU | 640 |
| M28 | GCCACAAGAACACATCATACA | 492 | GCCACAAGAACACAUCAUACA | 641 |
| M28 | CCACAAGAACACATCATACA | 493 | CCACAAGAACACAUCAUACA | 642 |
| M29 | TACTTTCCAATCAATAGGCCT | 494 | UACUUUCCAAUCAAUAGGCCU | 643 |
| M29 | ACTTTCCAATCAATAGGCCT | 495 | ACUUUCCAAUCAAUAGGCCU | 644 |
| M3 | CACATCCAGCGATAACCAGG | 496 | CACAUCCAGCGAUAACCAGG | 645 |
| M3 | ACACATCCAGCGATAACCAGG | 497 | ACACAUCCAGCGAUAACCAGG | 646 |
| M30 | TGTCAACGAATTGTGGGTCTT | 498 | UGUCAACGAAUUGUGGGUCUU | 647 |
| M30 | GTCAACGAATTGTGGGTCTT | 499 | GUCAACGAAUUGUGGGUCUU | 648 |
| M31 | TACACAATGTGGTTATCCTGC | 500 | UACACAAUGUGGUUAUCCUGC | 649 |
| M31 | ACACAATGTGGTTATCCTGC | 501 | ACACAAUGUGGUUAUCCUGC | 650 |
| M32 | CGGCAACGGCCAGGTCTGTG | 502 | CGGCAACGGCCAGGUCUGUG | 651 |
| M32 | CCGGCAACGGCCAGGTCTGTG | 503 | CCGGCAACGGCCAGGUCUGUG | 652 |
| M33 | GGTGGTCTCCATGCGACGTGC | 504 | GGUGGUCUCCAUGCGACGUGC | 653 |
| M34 | TACCGCAGAGTCTAGACTCG | 505 | UACCGCAGAGUCUAGACUCG | 654 |
| M35 | CGCAGAGTCTAGACTCGTGG | 506 | CGCAGAGUCUAGACUCGUGG | 655 |
| M36 | CACCACGAGTCTAGACTCTG | 507 | CACCACGAGUCUAGACUCUG | 656 |
| M37 | GAAAGCCCAGGATGATGGGA | 508 | GAAAGCCCAGGAUGAUGGGA | 657 |
| (gRNA37) | | | | |
| M38 | CCACCCAAGGCACAGCTTGG | 509 | CCACCCAAGGCACAGCUUGG | 658 |
| M39 | AAGCCACCCAAGGCACAGCT | 510 | AAGCCACCCAAGGCACAGCU | 659 |
| M4 | GAAAGCCCAGGATGATGGGAT | 511 | GAAAGCCCAGGAUGAUGGGAU | 660 |
| M4 | AAAGCCCAGGATGATGGGAT | 512 | AAAGCCCAGGAUGAUGGGAU | 661 |
| M40 | CCATGCCCCAAAGCCACCCA | 513 | CCAUGCCCCAAAGCCACCCA | 662 |
| (gRNA40) | | | | |
| M41 | TCAGGCAAGCAATTCTTTGC | 514 | UCAGGCAAGCAAUUCUUUGC | 663 |
| M42 | CAGGCAAGCAATTCTTTGCT | 515 | CAGGCAAGCAAUUCUUUGCU | 664 |
| M43 | AGGCAAGCAATTCTTTGCTG | 516 | AGGCAAGCAAUUCUUUGCUG | 665 |
| M44 | GGCAAGCAATTCTTTGCTGG | 517 | GGCAAGCAAUUCUUUGCUGG | 666 |
| M45 | GCAAGCAATTCTTTGCTGGG | 518 | GCAAGCAAUUCUUUGCUGGG | 667 |
| M46 | TCCAAGGAATACTAACATTG | 519 | UCCAAGGAAUACUAACAUUG | 668 |
| M47 | TTCCAATGAGGATTAAAGAC | 520 | UUCCAAUGAGGAUUAAAGAC | 669 |
| M48 | TGCAATTGATTATGCCTGCT | 521 | UGCAAUUGAUUAUGCCUGCU | 670 |
| M49 | TGGGAACAAGATCTACAGCA | 522 | UGGGAACAAGAUCUACAGCA | 671 |
| M5 | CGAACCACTGAACAAATGGC | 523 | CGAACCACUGAACAAAUGGC | 672 |
| M5 | ACGAACCACTGAACAAATGGC | 524 | ACGAACCACUGAACAAAUGGC | 673 |
| M50 | GGGAACAAGATCTACAGCAT | 525 | GGGAACAAGAUCUACAGCAU | 674 |
| M51 | GGAACAAGATCTACAGCATG | 526 | GGAACAAGAUCUACAGCAUG | 675 |
| M52 | TCAATCCCAACAAGGACACC | 527 | UCAAUCCCAACAAGGACACC | 676 |
| (gRNA52) | | | | |
| M53 | GACGCCAACAAGGTAGGAGC | 528 | GACGCCAACAAGGUAGGAGC | 677 |
| M54 | TGCTCCAGCTCCTACCTTGT | 529 | UGCUCCAGCUCCUACCUUGU | 678 |
| M55 | CCACCAATCGCCAGACAGGA | 530 | CCACCAAUCGCCAGACAGGA | 679 |
| M56 | AGCCACCAGCAGGGAAATAC | 531 | AGCCACCAGCAGGGAAAUAC | 680 |
| M57 | ACCAGGACAAGTTGGAGGAC | 532 | ACCAGGACAAGUUGGAGGAC | 681 |
| M58 | CGATAACCAGGACAAGTTGG | 533 | CGAUAACCAGGACAAGUUGG | 682 |
| M59 | CCCATCTCTTTGTTTTGTTA | 534 | CCCAUCUCUUUGUUUUGUUA | 683 |
| M6 | CATCCATATAACTGAAAGCCA | 535 | CAUCCAUAUAACUGAAAGCCA | 684 |
| M6 | ATCCATATAACTGAAAGCCA | 536 | AUCCAUAUAACUGAAAGCCA | 685 |
| M60 | CCCCATCTCTTTGTTTTGTT | 537 | CCCCAUCUCUUUGUUUUGUU | 686 |
| M61 | TCAACGAATTGTGGGTCTTT | 538 | UCAACGAAUUGUGGGUCUUU | 687 |
| M62 | CAACGAATTGTGGGTCTTTT | 539 | CAACGAAUUGUGGGUCUUUU | 688 |
| M63 | GGTCTCCATGCGACGTGCAG | 540 | GGUCUCCAUGCGACGUGCAG | 689 |
| M64 | ACAGGCGGGGTTTTTCTTGT | 541 | ACAGGCGGGGUUUUUCUUGU | 690 |
| M65 | GCAGAGTCTAGACTCGTGGT | 542 | GCAGAGUCUAGACUCGUGGU | 691 |
| M66/E13 | GAGAAGTCCACCACGAGTCT | 543 | GAGAAGUCCACCACGAGUCU | 692 |
| M67 | GACACATCCAGCGATAACCA | 544 | GACACAUCCAGCGAUAACCA | 693 |
| M68 | AAGCCCAGGATGATGGGATG | 545 | AAGCCCAGGAUGAUGGGAUG | 694 |
| M69 | CCACTCCCATAGGAATTTTC | 546 | CCACUCCCAUAGGAAUUUUC | 695 |
| M7 | TATACCCAAAGACAAAAGAAA | 547 | UAUACCCAAAGACAAAAGAAA | 696 |
| M7 | ATACCCAAAGACAAAAGAAA | 548 | AUACCCAAAGACAAAAGAAA | 697 |
| M70 | CTGAGCCAGGAGAAACGGGC | 549 | CUGAGCCAGGAGAAACGGGC | 698 |
| M71 | TACCACATCATCCATATAAC | 550 | UACCACAUCAUCCAUAUAAC | 699 |
| M72 | AGCCACCCAAGGCACAGCTT | 551 | AGCCACCCAAGGCACAGCUU | 700 |
| M73 | CCAGCAAAGAATTGCTTGCC | 552 | CCAGCAAAGAAUUGCUUGCC | 701 |
| M74 | GACGACGAGGCAGGTCCCCT | 553 | GACGACGAGGCAGGUCCCCU | 702 |
| M75 | GACGAGGCAGGTCCCCTAGA | 554 | GACGAGGCAGGUCCCCUAGA | 703 |
| M76 | GGTCTCAATCGCCGCGTCGC | 555 | GGUCUCAAUCGCCGCGUCGC | 704 |
| M77 | CTCAATCGCCGCGTCGCAGA | 556 | CUCAAUCGCCGCGUCGCAGA | 705 |
| M78 | AGTCCAAGGAATACTAACAT | 557 | AGUCCAAGGAAUACUAACAU | 706 |
| M79 | TGTTTTCCAATGAGGATTAA | 558 | UGUUUUCCAAUGAGGAUUAA | 707 |
| M8 | CATGCAACTTTTTCACCTCTG | 559 | CAUGCAACUUUUUCACCUCUG | 708 |
| M8 | ATGCAACTTTTTCACCTCTG | 560 | AUGCAACUUUUUCACCUCUG | 709 |
| M80 | TTTCCACCAGCAATCCTCTG | 561 | UUUCCACCAGCAAUCCUCUG | 710 |
| M81 | CCCAACAAGGACACCTGGCC | 562 | CCCAACAAGGACACCUGGCC | 711 |
| M82 | ACGCCAACAAGGTAGGAGCT | 563 | ACGCCAACAAGGUAGGAGCU | 712 |
| M83 | CCTCCACCAATCGCCAGACA | 564 | CCUCCACCAAUCGCCAGACA | 713 |
| M84 | CCAATCCTCGAGAAGATTGA | 565 | CCAAUCCUCGAGAAGAUUGA | 714 |
| M85 | TCCCCAATCCTCGAGAAGAT | 566 | UCCCCAAUCCUCGAGAAGAU | 715 |
| M86 | AGGGTCCCCAATCCTCGAGA | 567 | AGGGUCCCCAAUCCUCGAGA | 716 |
| M87 | CTTCTCTCAATTTTCTAGGG | 568 | CUUCUCUCAAUUUUCUAGGG | 717 |
| M89 | GATAACCAGGACAAGTTGGA | 569 | GAUAACCAGGACAAGUUGGA | 718 |
| M9 | TCAAGCCTCCAAGCTGTGCC | 570 | UCAAGCCUCCAAGCUGUGCC | 719 |
| M90 | CCACCAGCACGGGACCATGC | 571 | CCACCAGCACGGGACCAUGC | 720 |
| M92 | CTCCATGCGACGTGCAGAGG | 572 | CUCCAUGCGACGUGCAGAGG | 721 |
| M93 | GTGGTCTCCATGCGACGTGC | 573 | GUGGUCUCCAUGCGACGUGC | 722 |
| M94 | TATGGATGATGTGGTATTGG | 574 | UAUGGAUGAUGUGGUAUUGG | 723 |
| MSP37 (B*) | GAAAGCCCAAGATGATGGGA | 10833 | GAAAGCCCAAGAUGAUGGGA | 10834 |

[0211] The gRNAs can target the HBV core protein, the HBV polymerase gene, the HBV surface protein, or the HBV X protein. In embodiments, the PAM sequence associated with a sequence targeted by a gRNA is not limiting. Other targets can include the polyadenylation signal (PAS) involved in cccDNA transcriptional activity and unique for all the vital RNAs. PAS serves as a regulatory element (TATA box) as well. Targeting the PAS in cccDNA could destabilize all viral RNA species, including pgRNA and lead to ccc DNA silencing. The sgRNAs can target main regulatory regions in cccDNA (e.g., Enhancer I, Enhancer II, Basal Core promoter, Cryptaic and canonical polyadenylation signals (PAS), and S and X gene promoters). The gRNAs can be designed and evaluated in silico prior to being tested in cells (e.g., an HEK293-lentiHBV system).

[0212] In embodiments any one of guides E1 to E24 are used in combination with a nucleobase editor polypeptide comprising SaCas9 and/or target a sequence associated with an NNRRT, NGG, or NGA PAM sequence. In embodiments, a guide RNA comprising any of the spacer sequences provided herein (e.g., those listed in any of Tables 2A-2C or in the Sequence Listing), or variants thereof, are used in combination with any of the base editors and/or nucleic acid programmable DNA binding protein provided herein (e.g., BE4 or Cas12b).

[0213] In certain embodiments, the fusion proteins provided herein comprise one or more features that improve the base editing activity of the fusion proteins. For example, any of the fusion proteins provided herein may comprise a Cas9 domain that has reduced nuclease activity. In some embodiments, any of the fusion proteins provided herein may have a Cas9 domain that does not have nuclease activity (dCas9), or a Cas9 domain that cuts one strand of a duplexed DNA molecule, referred to as a Cas9 nickase (nCas9). Without wishing to be bound by any particular theory, the presence of the catalytic residue (e.g., H840) maintains the activity of the Cas9 to cleave the non-edited (e.g., non-methylated) strand opposite the targeted nucleobase. Mutation of the catalytic residue (e.g., D10 to A10) prevents cleavage of the edited strand containing the targeted A residue. Such Cas9 variants can generate a single-strand DNA break (nick) at a specific location based on the gRNA-defined target sequence, leading to repair of the non-edited strand, ultimately resulting in a nucleobase change on the non-edited strand.

[0214] In some embodiments, a precise modification of an HBV gene decreases the virulence of the virus and/or decreases the ability of the virus to propagate in vitro. The modification can be a premature stop codon or other mutation that impairs or otherwise reduces the activity of an HBV protein. In some embodiments, the HBV gene that is targeted for modification is the pol, X, S, pre-S1, pre-S2, the core of pre-core genes, a transcription site, or a combination thereof.

### Nucleobase Editors

[0215] Useful in the methods and compositions described herein are nucleobase editors that edit, modify or alter a target nucleotide sequence of a polynucleotide. Nucleobase editors described herein typically include a polynucleotide programmable nucleotide binding domain and a nucleobase editing domain (e.g., adenosine deaminase or cytidine deaminase). A polynucleotide programmable nucleotide binding domain, when in conjunction with a bound guide polynucleotide (e.g., gRNA), can specifically bind to a target polynucleotide sequence and thereby localize the base editor to the target nucleic acid sequence desired to be edited.

### Polynucleotide Programmable Nucleotide Binding Domain

[0216] Polynucleotide programmable nucleotide binding domains bind polynucleotides (e.g., RNA, DNA). A polynucleotide programmable nucleotide binding domain of a base editor can itself comprise one or more domains (e.g., one or more nuclease domains). In some embodiments, the nuclease domain of a polynucleotide programmable nucleotide binding domain can comprise an endonuclease or an exonuclease. An endonuclease can cleave a single strand of a double-stranded nucleic acid or both strands of a double-stranded nucleic acid molecule. In some embodiments, a nuclease domain of a polynucleotide programmable nucleotide binding domain can cut zero, one, or two strands of a target polynucleotide.

[0217] Non-limiting examples of a polynucleotide programmable nucleotide binding domain which can be incorporated into a base editor include a CRISPR protein-derived domain, a restriction nuclease, a meganuclease, TAL nuclease (TALEN), and a zinc finger nuclease (ZFN). In some embodiments, a base editor comprises a polynucleotide programmable nucleotide binding domain comprising a natural or modified protein or portion thereof which via a bound guide nucleic acid is capable of binding to a nucleic acid sequence during CRISPR (i.e., Clustered Regularly Interspaced Short Palindromic Repeats)-mediated modification of a nucleic acid. Such a protein is referred to herein as a “CRISPR protein.” Accordingly, disclosed herein is a base editor comprising a polynucleotide programmable nucleotide binding domain comprising all or a portion of a CRISPR protein (i.e. a base editor comprising as a domain all or a portion of a CRISPR protein, also referred to as a “CRISPR protein-derived domain” of the base editor). A CRISPR protein-derived domain incorporated into a base editor can be modified compared to a wild-type or natural version of the CRISPR protein. For example, as described below a CRISPR protein-derived domain can comprise one or more mutations, insertions, deletions, rearrangements and/or recombinations relative to a wild-type or natural version of the CRISPR protein.

[0218] Cas proteins that can be used herein include class 1 and class 2. Non-limiting examples of Cas proteins include Cas1, Cas1B, Cas2, Cas3, Cas4, Cas5, Cas5d, Cas5t, Cas5h, Cas5a, Cas6, Cas7, Cas8, Cas9 (also known as Csn1 or Csx12), Cas10, Csy1, Csy2, Csy3, Csy4, Cse1, Cse2, Cse3, Cse4, Cse5e, Csc1, Csc2, Csa5, Csn1, Csn2, Csm1, Csm2, Csm3, Csm4, Csm5, Csm6, Cmr1, Cmr3, Cmr4, Cmr5, Cmr6, Csb1, Csb2, Csb3, Csx17, Csx14, Csx10, Csx16, CsaX, Csx3, Csx1, Csx1S, Csf1, Csf2, CsO, Csf4, Csd1, Csd2, Cst1, Cst2, Csh1, Csh2, Csa1, Csa2, Csa3, Csa4, Csa5, Cas12a/Cpf1, Cas12b/C2c1 (e.g., SEQ ID NO: 232), Cas12c/C2c3, Cas12d/CasY, Cas12e/CasX, Cas12g, Cas12h, Cas12i, and Cas12j/CasΦ, CARF, DinG, homologues thereof, or modified versions thereof. A CRISPR enzyme can direct cleavage of one or both strands at a target sequence, such as within a target sequence and/or within a complement of a target sequence. For example, a CRISPR enzyme can direct cleavage of one or both strands within about 1, 2, 3, 4, 5, 6, 7, 8, 9, 10, 15, 20, 25, 50, 100, 200, 500, or more base pairs from the first or last nucleotide of a target sequence.

[0219] A vector that encodes a CRISPR enzyme that is mutated to with respect, to a corresponding wild-type enzyme such that the mutated CRISPR enzyme lacks the ability to cleave one or both strands of a target polynucleotide containing a target sequence can be used. A Cas protein (e.g., Cas9, Cas12) or a Cas domain (e.g., Cas9, Cas12) can refer to a polypeptide or domain with at least or at least about 50%, 60%, 70%, 80%, 90%, 91%, 92%, 93%, 94%, 95%, 96%, 97%, 98%, 99%, or 100% sequence identity and/or sequence homology to a wild-type exemplary Cas polypeptide or Cas domain. Cas (e.g., Cas9, Cas12) can refer to the wild-type or a modified form of the Cas protein that can comprise an amino acid change such as a deletion, insertion, substitution, variant, mutation, fusion, chimera, or any combination thereof. In some embodiments, a CRISPR protein-derived domain of a base editor can include all or a portion of Cas9 from Corynebacterium ulcerans (NCBI Refs: NC_015683.1, NC_017317.1); Corynebacterium diphtheria (NCBI Refs: NC_016782.1, NC_016786.1); Spiroplasma syrphidicola (NCBI Ref: NC_021284.1); Prevotella intermedia (NCBI Ref: NC_017861.1); Spiroplasma taiwanense (NCBI Ref: NC_021846.1); Streptococcus iniae (NCBI Ref: NC_021314.1); Belliella baltica (NCBI Ref: NC_018010.1); Psychroflexus torquis (NCBI Ref: NC_018721.1); Streptococcus thermophilus (NCBI Ref: YP_820832.1); Listeria innocua (NCBI Ref: NP_472073.1); Campylobacter jejuni (NCBI Ref: YP_002344900.1); Neisseria meningitidis (NCBI Ref: YP_002342100.1), Streptococcus pyogenes, or Staphylococcus aureus.

[0220] Cas9 nuclease sequences and structures are well known to those of skill in the art (See, e.g., “Complete genome sequence of an M1 strain of Streptococcus pyogenes.” Ferretti et al., Proc. Natl. Acad. Sci. U.S.A. 98:4658-4663(2001); “CRISPR RNA maturation by trans-encoded small RNA and host factor RNase III.” Deltcheva E., et al., Nature 471:602-607(2011); and “A programmable dual-RNA-guided DNA endonuclease in adaptive bacterial immunity.” Jinek M., et al., Science 337:816-821(2012), the entire contents of each of which are incorporated herein by reference). Cas9 orthologs have been described in various species, including, but not limited to, S. pyogenes and S. thermophilus. Additional suitable Cas9 nucleases and sequences will be apparent to those of skill in the art based on this disclosure, and such Cas9 nucleases and sequences include Cas9 sequences from the organisms and loci disclosed in Chylinski, Rhun, and Charpentier, “The tracrRNA and Cas9 families of type II CRISPR-Cas immunity systems” (2013) RNA Biology 10:5, 726-737; the entire contents of which are incorporated herein by reference.

### High Fidelity Cas9 Domains

[0221] Some aspects of the disclosure provide high fidelity Cas9 domains. High fidelity Cas9 domains are known in the art and described, for example, in Kleinstiver, B. P., et al. “High-fidelity CRISPR-Cas9 nucleases with no detectable genome-wide off-target effects.”Nature 529, 490-495 (2016); and Slaymaker, I. M., et al. “Rationally engineered Cas9 nucleases with improved specificity.” Science 351, 84-88 (2015); the entire contents of each of which are incorporated herein by reference. An Exemplary high fidelity Cas9 domain is provided in the Sequence Listing as SEQ ID NO: 233. In some embodiments, high fidelity Cas9 domains are engineered Cas9 domains comprising one or more mutations that decrease electrostatic interactions between the Cas9 domain and the sugar-phosphate backbone of a DNA, relative to a corresponding wild-type Cas9 domain. High fidelity Cas9 domains that have decreased electrostatic interactions with the sugar-phosphate backbone of DNA have less off-target effects. In some embodiments, the Cas9 domain (e.g., a wild type Cas9 domain (SEQ ID NOs: 197 and 200)) comprises one or more mutations that decrease the association between the Cas9 domain and the sugar-phosphate backbone of a DNA. In some embodiments, a Cas9 domain comprises one or more mutations that decreases the association between the Cas9 domain and the sugar-phosphate backbone of DNA by at least 1%, at least 2%, at least 3%, at least 4%, at least 5%, at least 10%, at least 15%, at least 20%, at least 25%, at least 30%, at least 35%, at least 40%, at least 45%, at least 50%, at least 55%, at least 60%, at least 65%, or at least 70%. In some embodiments, any of the Cas9 fusion proteins provided herein comprise one or more of a D10A, N497X, a R661X, a Q695X, and/or a Q926X mutation, or a corresponding mutation in any of the amino acid sequences provided herein, wherein X is any amino acid. In some embodiments, the high fidelity Cas9 enzyme is SpCas9(K855A), eSpCas9(1.1), SpCas9-HF1, or hyper accurate Cas9 variant (HypaCas9). In some embodiments, the modified Cas9 eSpCas9(1.1) contains alanine substitutions that weaken the interactions between the HNH/RuvC groove and the non-target DNA strand, preventing strand separation and cutting at off-target sites. Similarly, SpCas9-HF1 lowers off-target editing through alanine substitutions that disrupt Cas9's interactions with the DNA phosphate backbone. HypaCas9 contains mutations (SpCas9 N692A/M694A/Q695A/H698A) in the REC3 domain that increase Cas9 proofreading and target discrimination. All three high fidelity enzymes generate less off-target editing than wildtype Cas9.

Cas9 Domains with Reduced Exclusivity

[0222] Typically, Cas9 proteins, such as Cas9 from S. pyogenes (spCas9), require a “protospacer adjacent motif (PAM)” or PAM-like motif, which is a 2-6 base pair DNA sequence immediately following the DNA sequence targeted by the Cas9 nuclease in the CRISPR bacterial adaptive immune system. The presence of an NGG PAM sequence is required to bind a particular nucleic acid region, where the “N” in “NGG” is adenosine (A), thymidine (T), or cytosine (C), and the G is guanosine. This may limit the ability to edit desired bases within a genome. In some embodiments, the base editing fusion proteins provided herein may need to be placed at a precise location, for example a region comprising a target base that is upstream of the PAM. See e.g., Komor, A. C., et al., “Programmable editing of a target base in genomic DNA without double-stranded DNA cleavage” Nature 533, 420-424 (2016), the entire contents of which are hereby incorporated by reference. Exemplary polypeptide sequences for spCas9 proteins capable of binding a PAM sequence are provided in the Sequence Listing as SEQ ID NOs: 197, 201 and 234-237. Accordingly, in some embodiments, any of the fusion proteins provided herein may contain a Cas9 domain that is capable of binding a nucleotide sequence that does not contain a canonical (e.g., NGG) PAM sequence. Cas9 domains that bind to non-canonical PAM sequences have been described in the art and would be apparent to the skilled artisan. For example, Cas9 domains that bind non-canonical PAM sequences have been described in Kleinstiver, B. P., et al., “Engineered CRISPR-Cas9 nucleases with altered PAM specificities” Nature 523, 481-485 (2015); and Kleinstiver, B. P., et al., “Broadening the targeting range of Staphylococcus aureus CRISPR-Cas9 by modifying PAM recognition” Nature Biotechnology 33, 1293-1298 (2015); the entire contents of each are hereby incorporated by reference.

### Nickases

[0223] In some embodiments, the polynucleotide programmable nucleotide binding domain can comprise a nickase domain. Herein the term “nickase” refers to a polynucleotide programmable nucleotide binding domain comprising a nuclease domain that is capable of cleaving only one strand of the two strands in a duplexed nucleic acid molecule (e.g., DNA). In some embodiments, a nickase can be derived from a fully catalytically active (e.g., natural) form of a polynucleotide programmable nucleotide binding domain by introducing one or more mutations into the active polynucleotide programmable nucleotide binding domain. For example, where a polynucleotide programmable nucleotide binding domain comprises a nickase domain derived from Cas9, the Cas9-derived nickase domain can include a D10A mutation and a histidine at position 840. In such embodiments, the residue H840 retains catalytic activity and can thereby cleave a single strand of the nucleic acid duplex. In another example, a Cas9-derived nickase domain can comprise an H840A mutation, while the amino acid residue at position 10 remains a D. In some embodiments, a nickase can be derived from a fully catalytically active (e.g., natural) form of a polynucleotide programmable nucleotide binding domain by removing all or a portion of a nuclease domain that is not required for the nickase activity. For example, where a polynucleotide programmable nucleotide binding domain comprises a nickase domain derived from Cas9, the Cas9-derived nickase domain can comprise a deletion of all or a portion of the RuvC domain or the HNH domain.

[0224] In some embodiments, wild-type Cas9 corresponds to, or comprises the following amino acid sequence:

(SEQ ID NO: 197)
[sequence omitted]

(single underline: HNH domain; double underline: RuvC domain).

[0225] In some embodiments, the strand of a nucleic acid duplex target polynucleotide sequence that is cleaved by a base editor comprising a nickase domain (e.g., Cas9-derived nickase domain, Cas12-derived nickase domain) is the strand that is not edited by the base editor (i.e., the strand that is cleaved by the base editor is opposite to a strand comprising a base to be edited). In other embodiments, a base editor comprising a nickase domain (e.g., Cas9-derived nickase domain, Cas12-derived nickase domain) can cleave the strand of a DNA molecule which is being targeted for editing. In such embodiments, the non-targeted strand is not cleaved. In some embodiments, a Cas9 nuclease has an inactive (e.g., an inactivated) DNA cleavage domain, that is, the Cas9 is a nickase, referred to as an “nCas9” protein (for “nickase” Cas9). The Cas9 nickase may be a Cas9 protein that is capable of cleaving only one strand of a duplexed nucleic acid molecule (e.g., a duplexed DNA molecule). In some embodiments the Cas9 nickase cleaves the target strand of a duplexed nucleic acid molecule, meaning that the Cas9 nickase cleaves the strand that is base paired to (complementary to) a gRNA (e.g., an sgRNA) that is bound to the Cas9. In some embodiments, a Cas9 nickase comprises a D10A mutation and has a histidine at position 840. In some embodiments the Cas9 nickase cleaves the non-target, non-base-edited strand of a duplexed nucleic acid molecule, meaning that the Cas9 nickase cleaves the strand that is not base paired to a gRNA (e.g., an sgRNA) that is bound to the Cas9. In some embodiments, a Cas9 nickase comprises an H840A mutation and has an aspartic acid residue at position 10, or a corresponding mutation. In some embodiments the Cas9 nickase comprises an amino acid sequence that is at least 60%, at least 65%, at least 70%, at least 75%, at least 80%, at least 85%, at least 90%, at least 95%, at least 96%, at least 97%, at least 98%, at least 99%, or at least 99.5% identical to any one of the Cas9 nickases provided herein. Additional suitable Cas9 nickases will be apparent to those of skill in the art based on this disclosure and knowledge in the field, and are within the scope of this disclosure.

[0226] The amino acid sequence of an exemplary catalytically Cas9 nickase (nCas9) is as follows:

(SEQ ID NO: 201)
MDKKYSIGLAIGTNSVGWAVITDEYKVPSKKFKVLGNTDRHSIKKNLIGALLFDSGETAEATRL
KRTARRRYTRRKNRICYLQEIFSNEMAKVDDSFFHRLEESFLVEEDKKHERHPIFGNIVDEVAY
HEKYPTIYHLRKKLVDSTDKADLRLIYLALAHMIKFRGHFLIEGDLNPDNSDVDKLFIQLVQTY
NQLFEENPINASGVDAKAILSARLSKSRRLENLIAQLPGEKKNGLFGNLIALSLGLTPNFKSNF
DLAEDAKLQLSKDTYDDDLDNLLAQIGDQYADLFLAAKNLSDAILLSDILRVNTEITKAPLSAS
MIKRYDEHHQDLTLLKALVRQQLPEKYKEIFFDQSKNGYAGYIDGGASQEEFYKFIKPILEKMD
GTEELLVKLNREDLLRKQRTFDNGSIPHQIHLGELHAILRRQEDFYPFLKDNREKIEKILTFRI
PYYVGPLARGNSRFAWMTRKSEETITPWNFEEVVDKGASAQSFIERMTNFDKNLPNEKVLPKHS
LLYEYFTVYNELTKVKYVTEGMRKPAFLSGEQKKAIVDLLFKTNRKVTVKQLKEDYFKKIECFD
SVEISGVEDRFNASLGTYHDLLKIIKDKDFLDNEENEDILEDIVLTLTLFEDREMIEERLKTYA
HLFDDKVMKQLKRRRYTGWGRLSRKLINGIRDKQSGKTILDFLKSDGFANRNFMQLIHDDSLTF
KEDIQKAQVSGQGDSLHEHIANLAGSPAIKKGILQTVKVVDELVKVMGRHKPENIVIEMARENQ
TTQKGQKNSRERMKRIEEGIKELGSQILKEHPVENTQLQNEKLYLYYLQNGRDMYVDQELDINR
LSDYDVDHIVPQSFLKDDSIDNKVLTRSDKNRGKSDNVPSEEVVKKMKNYWRQLLNAKLITQRK
FDNLTKAERGGLSELDKAGFIKRQLVETRQITKHVAQILDSRMNTKYDENDKLIREVKVITLKS
KLVSDFRKDFQFYKVREINNYHHAHDAYLNAVVGTALIKKYPKLESEFVYGDYKVYDVRKMIAK
SEQEIGKATAKYFFYSNIMNFFKTEITLANGEIRKRPLIETNGETGEIVWDKGRDFATVRKVLS
MPQVNIVKKTEVQTGGFSKESILPKRNSDKLIARKKDWDPKKYGGFDSPTVAYSVLVVAKVEKG
KSKKLKSVKELLGITIMERSSFEKNPIDFLEAKGYKEVKKDLIIKLPKYSLFELENGRKRMLAS
AGELQKGNELALPSKYVNFLYLASHYEKLKGSPEDNEQKQLFVEQHKHYLDEIIEQISEFSKRV
ILADANLDKVLSAYNKHRDKPIREQAENIIHLFTLTNLGAPAAFKYFDTTIDRKRYTSTKEVLD
ATLIHQSITGLYETRIDLSQLGGD.

[0227] The Cas9 nuclease has two functional endonuclease domains: RuvC and HNH. Cas9 undergoes a conformational change upon target binding that positions the nuclease domains to cleave opposite strands of the target DNA. The end result of Cas9-mediated DNA cleavage is a double-strand break (DSB) within the target DNA (˜3-4 nucleotides upstream of the PAM sequence). The resulting DSB is then repaired by one of two general repair pathways: (1) the efficient but error-prone non-homologous end joining (NHEJ) pathway; or (2) the less efficient but high-fidelity homology directed repair (HDR) pathway.

[0228] The “efficiency” of non-homologous end joining (NHEJ) and/or homology directed repair (HDR) can be calculated by any convenient method. For example, in some embodiments, efficiency can be expressed in terms of percentage of successful HDR For example, a surveyor nuclease assay can be used to generate cleavage products and the ratio of products to substrate can be used to calculate the percentage. For example, a surveyor nuclease enzyme can be used that directly cleaves DNA containing a newly integrated restriction sequence as the result of successful HDR. More cleaved substrate indicates a greater percent HDR (a greater efficiency of HDR). As an illustrative example, a fraction (percentage) of HDR can be calculated using the following equation [(cleavage products)/(substrate plus cleavage products)] (e.g., (b+c)/(a+b+c), where “a” is the band intensity of DNA substrate and “b” and “c” are the cleavage products).

[0229] In some embodiments, efficiency can be expressed in terms of percentage of successful NHEJ. For example, a T7 endonuclease I assay can be used to generate cleavage products and the ratio of products to substrate can be used to calculate the percentage NHEJ. T7 endonuclease I cleaves mismatched heteroduplex DNA which arises from hybridization of wild-type and mutant DNA strands (NHEJ generates small random insertions or deletions (indels) at the site of the original break). More cleavage indicates a greater percent NHEJ (a greater efficiency of NHEJ). As an illustrative example, a fraction (percentage) of NHEJ can be calculated using the following equation: (1−(1−(b+c)/(a+b+c))^{1/2})×100, where “a” is the band intensity of DNA substrate and “b” and “c” are the cleavage products (Ran et. al., Cell. 2013 Sep. 12; 154(6):1380-9; and Ran et al., Nat Protoc. 2013 November; 8(11): 2281-2308).

[0230] The NHEJ repair pathway is the most active repair mechanism, and it frequently causes small nucleotide insertions or deletions (indels) at the DSB site. The randomness of NHEJ-mediated DSB repair has important practical implications, because a population of cells expressing Cas9 and a gRNA or a guide polynucleotide can result in a diverse array of mutations. In most embodiments, NHEJ gives rise to small indels in the target DNA that result in amino acid deletions, insertions, or frameshift mutations leading to premature stop codons within the open reading frame (ORF) of the targeted gene. The ideal end result is a loss-of-function mutation within the targeted gene.

[0231] While NHEJ-mediated DSB repair often disrupts the open reading frame of the gene, homology directed repair (HDR) can be used to generate specific nucleotide changes ranging from a single nucleotide change to large insertions like the addition of a fluorophore or tag.

[0232] In order to utilize HDR for gene editing, a DNA repair template containing the desired sequence can be delivered into the cell type of interest with the gRNA(s) and Cas9 or Cas9 nickase. The repair template can contain the desired edit as well as additional homologous sequence immediately upstream and downstream of the target (termed left & right homology arms). The length of each homology arm can be dependent on the size of the change being introduced, with larger insertions requiring longer homology arms. The repair template can be a single-stranded oligonucleotide, double-stranded oligonucleotide, or a double-stranded DNA plasmid. The efficiency of HDR is generally low (<10% of modified alleles) even in cells that express Cas9, gRNA and an exogenous repair template. The efficiency of HDR can be enhanced by synchronizing the cells, since HDR takes place during the S and G2 phases of the cell cycle. Chemically or genetically inhibiting genes involved in NHEJ can also increase HDR frequency.

[0233] In some embodiments, Cas9 is a modified Cas9. A given gRNA targeting sequence can have additional sites throughout the genome where partial homology exists. These sites are called off-targets and need to be considered when designing a gRNA. In addition to optimizing gRNA design, CRISPR specificity can also be increased through modifications to Cas9. Cas9 generates double-strand breaks (DSBs) through the combined activity of two nuclease domains, RuvC and HNH. Cas9 nickase, a D10A mutant of SpCas9, retains one nuclease domain and generates a DNA nick rather than a DSB. The nickase system can also be combined with HDR-mediated gene editing for specific gene edits.

### Catalytically Dead Nucleases

[0234] Also provided herein are base editors comprising a polynucleotide programmable nucleotide binding domain which is catalytically dead (i.e., incapable of cleaving a target polynucleotide sequence). Herein the terms “catalytically dead” and “nuclease dead” are used interchangeably to refer to a polynucleotide programmable nucleotide binding domain which has one or more mutations and/or deletions resulting in its inability to cleave a strand of a nucleic acid. In some embodiments, a catalytically dead polynucleotide programmable nucleotide binding domain base editor can lack nuclease activity as a result of specific point mutations in one or more nuclease domains. For example, in the case of a base editor comprising a Cas9 domain, the Cas9 can comprise both a D10A mutation and an H840A mutation. Such mutations inactivate both nuclease domains, thereby resulting in the loss of nuclease activity. In other embodiments, a catalytically dead polynucleotide programmable nucleotide binding domain can comprise one or more deletions of all or a portion of a catalytic domain (e.g., RuvC1 and/or HNH domains). In further embodiments, a catalytically dead polynucleotide programmable nucleotide binding domain comprises a point mutation (e.g., D10A or H840A) as well as a deletion of all or a portion of a nuclease domain. dCas9 domains are known in the art and described, for example, in Qi et al., “Repurposing CRISPR as an RNA-guided platform for sequence-specific control of gene expression.” Cell. 2013; 152(5):1173-83, the entire contents of which are incorporated herein by reference.

[0235] Additional suitable nuclease-inactive dCas9 domains will be apparent to those of skill in the art based on this disclosure and knowledge in the field, and are within the scope of this disclosure. Such additional exemplary suitable nuclease-inactive Cas9 domains include, but are not limited to, D10A/H840A, D10A/D839A/H840A, and D10A/D839A/H840A/N863A mutant domains (See, e.g., Prashant et al., CAS9 transcriptional activators for target specificity screening and paired nickases for cooperative genome engineering. Nature Biotechnology. 2013; 31(9): 833-838, the entire contents of which are incorporated herein by reference).

[0236] In some embodiments, dCas9 corresponds to, or comprises in part or in whole, a Cas9 amino acid sequence having one or more mutations that inactivate the Cas9 nuclease activity. In some embodiments, the nuclease-inactive dCas9 domain comprises a D10X mutation and a H840X mutation of the amino acid sequence set forth herein, or a corresponding mutation in any of the amino acid sequences provided herein, wherein X is any amino acid change. In some embodiments, the nuclease-inactive dCas9 domain comprises a D10A mutation and a H840A mutation of the amino acid sequence set forth herein, or a corresponding mutation in any of the amino acid sequences provided herein. In some embodiments, a nuclease-inactive Cas9 domain comprises the amino acid sequence set forth in Cloning vector pPlatTET-gRNA2 (Accession No. BAV54124).

[0237] In some embodiments, a variant Cas9 protein can cleave the complementary strand of a guide target sequence but has reduced ability to cleave the non-complementary strand of a double stranded guide target sequence. For example, the variant Cas9 protein can have a mutation (amino acid substitution) that reduces the function of the RuvC domain. As a non-limiting example, in some embodiments, a variant Cas9 protein has a D10A (aspartate to alanine at amino acid position 10) and can therefore cleave the complementary strand of a double stranded guide target sequence but has reduced ability to cleave the non-complementary strand of a double stranded guide target sequence (thus resulting in a single strand break (SSB) instead of a double strand break (DSB) when the variant Cas9 protein cleaves a double stranded target nucleic acid) (see, for example, Jinek et al., Science. 2012 Aug. 17; 337(6096):816-21).

[0238] In some embodiments, a variant Cas9 protein can cleave the non-complementary strand of a double stranded guide target sequence but has reduced ability to cleave the complementary strand of the guide target sequence. For example, the variant Cas9 protein can have a mutation (amino acid substitution) that reduces the function of the HNH domain (RuvC/HNH/RuvC domain motifs). As a non-limiting example, in some embodiments, the variant Cas9 protein has an H840A (histidine to alanine at amino acid position 840) mutation and can therefore cleave the non-complementary strand of the guide target sequence but has reduced ability to cleave the complementary strand of the guide target sequence (thus resulting in a SSB instead of a DSB when the variant Cas9 protein cleaves a double stranded guide target sequence). Such a Cas9 protein has a reduced ability to cleave a guide target sequence (e.g., a single stranded guide target sequence) but retains the ability to bind a guide target sequence (e.g., a single stranded guide target sequence).

[0239] As another non-limiting example, in some embodiments, the variant Cas9 protein harbors W476A and W1126A mutations such that the polypeptide has a reduced ability to cleave a target DNA. Such a Cas9 protein has a reduced ability to cleave a target DNA (e.g., a single stranded target DNA) but retains the ability to bind a target DNA (e.g., a single stranded target DNA).

[0240] As another non-limiting example, in some embodiments, the variant Cas9 protein harbors P475A, W476A, N477A, D1125A, W1126A, and D1127A mutations such that the polypeptide has a reduced ability to cleave a target DNA. Such a Cas9 protein has a reduced ability to cleave a target DNA (e.g., a single stranded target DNA) but retains the ability to bind a target DNA (e.g., a single stranded target DNA).

[0241] As another non-limiting example, in some embodiments, the variant Cas9 protein harbors H840A, W476A, and W1126A, mutations such that the polypeptide has a reduced ability to cleave a target DNA. Such a Cas9 protein has a reduced ability to cleave a target DNA (e.g., a single stranded target DNA) but retains the ability to bind a target DNA (e.g., a single stranded target DNA). As another non-limiting example, in some embodiments, the variant Cas9 protein harbors H840A, D10A, W476A, and W1126A, mutations such that the polypeptide has a reduced ability to cleave a target DNA. Such a Cas9 protein has a reduced ability to cleave a target DNA (e.g., a single stranded target DNA) but retains the ability to bind a target DNA (e.g., a single stranded target DNA). In some embodiments, the variant Cas9 has restored catalytic His residue at position 840 in the Cas9 HNH domain (A840H).

[0242] As another non-limiting example, in some embodiments, the variant Cas9 protein harbors, H840A, P475A, W476A, N477A, D1125A, W1126A, and D1127A mutations such that the polypeptide has a reduced ability to cleave a target DNA. Such a Cas9 protein has a reduced ability to cleave a target DNA (e.g., a single stranded target DNA) but retains the ability to bind a target DNA (e.g., a single stranded target DNA). As another non-limiting example, in some embodiments, the variant Cas9 protein harbors D10A, H840A, P475A, W476A, N477A, D1125A, W1126A, and D1127A mutations such that the polypeptide has a reduced ability to cleave a target DNA. Such a Cas9 protein has a reduced ability to cleave a target DNA (e.g., a single stranded target DNA) but retains the ability to bind a target DNA (e.g., a single stranded target DNA). In some embodiments, when a variant Cas9 protein harbors W476A and Wi 126A mutations or when the variant Cas9 protein harbors P475A, W476A, N477A, D1125A, W1126A, and D1127A mutations, the variant Cas9 protein does not bind efficiently to a PAM sequence. Thus, in some such embodiments, when such a variant Cas9 protein is used in a method of binding, the method does not require a PAM sequence. In other words, in some embodiments, when such a variant Cas9 protein is used in a method of binding, the method can include a guide RNA, but the method can be performed in the absence of a PAM sequence (and the specificity of binding is therefore provided by the targeting segment of the guide RNA). Other residues can be mutated to achieve the above effects (i.e., inactivate one or the other nuclease portions). As non-limiting examples, residues D10, G12, G17, E762, H840, N854, N863, H982, H983, A984, D986, and/or A987 can be altered (i.e., substituted). Also, mutations other than alanine substitutions are suitable.

[0243] In some embodiments, a variant Cas9 protein that has reduced catalytic activity (e.g., when a Cas9 protein has a D10, G12, G17, E762, H840, N854, N863, H982, H983, A984, D986, and/or a A987 mutation, e.g., D10A, G12A, G17A, E762A, H840A, N854A, N863A, H982A, H983A, A984A, and/or D986A), the variant Cas9 protein can still bind to target DNA in a site-specific manner (because it is still guided to a target DNA sequence by a guide RNA) as long as it retains the ability to interact with the guide RNA.

[0244] In some embodiments, the variant Cas protein can be spCas9, spCas9-VRQR, spCas9-VRER, xCas9 (sp), saCas9, saCas9-KKH, spCas9-MQKSER, spCas9-LRKIQK, or spCas9-LRVSQL.

[0245] In some embodiments, the Cas9 domain is a Cas9 domain from Staphylococcus aureus (SaCas9). In some embodiments, the SaCas9 domain is a nuclease active SaCas9, a nuclease inactive SaCas9 (SaCas9d), or a SaCas9 nickase (SaCas9n). In some embodiments, the SaCas9 comprises a N579A mutation, or a corresponding mutation in any of the amino acid sequences provided in the Sequence Listing submitted herewith.

[0246] In some embodiments, the SaCas9 domain, the SaCas9d domain, or the SaCas9n domain can bind to a nucleic acid sequence having a non-canonical PAM. In some embodiments, the SaCas9 domain, the SaCas9d domain, or the SaCas9n domain can bind to a nucleic acid sequence having a NNGRRT or a NNGRRV PAM sequence. In some embodiments, the SaCas9 domain comprises one or more of a E781X, a N967X, and a R1014X mutation, or a corresponding mutation in any of the amino acid sequences provided herein, wherein X is any amino acid. In some embodiments, the SaCas9 domain comprises one or more of a E781K, a N967K, and a R1014H mutation, or one or more corresponding mutation in any of the amino acid sequences provided herein. In some embodiments, the SaCas9 domain comprises a E781K, a N967K, or a R1014H mutation, or corresponding mutations in any of the amino acid sequences provided herein.

[0247] In some embodiments, one of the Cas9 domains present in the fusion protein may be replaced with a guide nucleotide sequence-programmable DNA-binding protein domain that has no requirements for a PAM sequence. In some embodiments, the Cas9 is an SaCas9. Residue A579 of SaCas9 can be mutated from N579 to yield a SaCas9 nickase. Residues K781, K967, and H1014 can be mutated from E781, N967, and R1014 to yield a SaKKH Cas9.

[0248] In some embodiments, a modified SpCas9 including amino acid substitutions D1135M, S1136Q, G1218K, E1219F, A1322R, D1332A, R1335E, and T1337R (SpCas9-MQKFRAER) and having specificity for the altered PAM 5′-NGC-3′ was used.

[0249] Alternatives to S. pyogenes Cas9 can include RNA-guided endonucleases from the Cpf1 family that display cleavage activity in mammalian cells. CRISPR from Prevotella and Francisella 1 (CRISPR/Cpf1) is a DNA-editing technology analogous to the CRISPR/Cas9 system. Cpf1 is an RNA-guided endonuclease of a class II CRISPR/Cas system. This acquired immune mechanism is found in Prevotella and Francisella bacteria. Cpf1 genes are associated with the CRISPR locus, coding for an endonuclease that use a guide RNA to find and cleave viral DNA. Cpf1 is a smaller and simpler endonuclease than Cas9, overcoming some of the CRISPR/Cas9 system limitations. Unlike Cas9 nucleases, the result of Cpf1-mediated DNA cleavage is a double-strand break with a short 3′ overhang. Cpf1's staggered cleavage pattern can open up the possibility of directional gene transfer, analogous to traditional restriction enzyme cloning, which can increase the efficiency of gene editing. Like the Cas9 variants and orthologues described above, Cpf1 can also expand the number of sites that can be targeted by CRISPR to AT-rich regions or AT-rich genomes that lack the NGG PAM sites favored by SpCas9. The Cpf1 locus contains a mixed alpha/beta domain, a RuvC-I followed by a helical region, a RuvC-II and a zinc finger-like domain. The Cpf1 protein has a RuvC-like endonuclease domain that is similar to the RuvC domain of Cas9.

[0250] Furthermore, Cpf1, unlike Cas9, does not have a HNH endonuclease domain, and the N-terminal of Cpf1 does not have the alpha-helical recognition lobe of Cas9. Cpf1 CRISPR-Cas domain architecture shows that Cpf1 is functionally unique, being classified as Class 2, type V CRISPR system. The Cpf1 loci encode Cas1, Cas2 and Cas4 proteins that are more similar to types I and III than type II systems. Functional Cpf1 does not require the trans-activating CRISPR RNA (tracrRNA), therefore, only CRISPR (crRNA) is required. This benefits genome editing because Cpf1 is not only smaller than Cas9, but also it has a smaller sgRNA molecule (approximately half as many nucleotides as Cas9). The Cpf1-crRNA complex cleaves target DNA or RNA by identification of a protospacer adjacent motif 5′-YTN-3′ or 5′-TTN-3′ in contrast to the G-rich PAM targeted by Cas9. After identification of PAM, Cpf1 introduces a sticky-end-like DNA double-stranded break having an overhang of 4 or 5 nucleotides.

[0251] In some embodiments, the Cas9 is a Cas9 variant having specificity for an altered PAM sequence. In some embodiments, the Additional Cas9 variants and PAM sequences are described in Miller, S. M., et al. Continuous evolution of SpCas9 variants compatible with non-G PAMs, Nat. Biotechnol. (2020), the entirety of which is incorporated herein by reference. in some embodiments, a Cas9 variate have no specific PAM requirements. In some embodiments, a Cas9 variant, e.g. a SpCas9 variant has specificity for a NRNH PAM, wherein R is A or G and H is A, C, or T. In some embodiments, the SpCas9 variant has specificity for a PAM sequence AAA, TAA, CAA, GAA, TAT, GAT, or CAC. In some embodiments, the SpCas9 variant comprises an amino acid substitution at position 1114, 1134, 1135, 1137, 1139, 1151, 1180, 1188, 1211, 1218, 1219, 1221, 1249, 1256, 1264, 1290, 1318, 1317, 1320, 1321, 1323, 1332, 1333, 1335, 1337, or 1339 or a corresponding position thereof. In some embodiments, the SpCas9 variant comprises an amino acid substitution at position 1114, 1135, 1218, 1219, 1221, 1249, 1320, 1321, 1323, 1332, 1333, 1335, or 1337 or a corresponding position thereof. In some embodiments, the SpCas9 variant comprises an amino acid substitution at position 1114, 1134, 1135, 1137, 1139, 1151, 1180, 1188, 1211, 1219, 1221, 1256, 1264, 1290, 1318, 1317, 1320, 1323, 1333 or a corresponding position thereof. In some embodiments, the SpCas9 variant comprises an amino acid substitution at position 1114, 1131, 1135, 1150, 1156, 1180, 1191, 1218, 1219, 1221, 1227, 1249, 1253, 1286, 1293, 1320, 1321, 1332, 1335, 1339 or a corresponding position thereof. In some embodiments, the SpCas9 variant comprises an amino acid substitution at position 1114, 1127, 1135, 1180, 1207, 1219, 1234, 1286, 1301, 1332, 1335, 1337, 1338, 1349 or a corresponding position thereof. Exemplary amino acid substitutions and PAM specificity of SpCas9 variants are shown in Tables 3A-3D.

TABLE 3A
SpCas9 Variants

| | SpCas9 amino acid position | | | | | | | | | | | | |
|---|---|---|---|---|---|---|---|---|---|---|---|---|---|
| | 1114 | 1135 | 1218 | 1219 | 1221 | 1249 | 1320 | 1321 | 1323 | 1332 | 1333 | 1335 | 1337 |
| PAM | R | D | G | E | Q | P | A | P | A | D | R | R | T |
| AAA | | N | | V | H | | | | | | G | | |
| AAA | | N | | V | H | | | | | | G | | |
| AAA | | | | V | | | | | | | G | | |
| TAA | G | N | | V | | | | | | | I | | |
| TAA | | N | | V | | | | | | | I | | A |
| TAA | G | N | | V | | | | | | | I | | A |
| CAA | | | | V | | | | | | | K | | |
| CAA | | N | | V | | | | | | | K | | |
| CAA | | N | | V | | | | | | | K | | |
| GAA | | | | V | H | | V | | | | K | | |
| GAA | | N | | V | | | V | | | | K | | |
| GAA | | | | V | H | | V | | | | K | | |
| TAT | | | S | V | H | S | | S | | | | L | |
| TAT | | | S | V | H | S | | S | | | | L | |
| TAT | | | S | V | H | S | | S | | | | L | |
| GAT | | | | V | | | | | | | I | | |
| GAT | | | | V | | | | | D | | | Q | |
| GAT | | | | V | | | | | D | | | Q | |
| CAC | | | | V | | | | | | N | | Q | N |
| CAC | | N | | V | | | | | | | | Q | N |
| CAC | | | | V | | | | | | N | | Q | N |

TABLE 3B

| | SpCas9 amino acid position | | | | | | | | | | | | | | | | | | |
|---|---|---|---|---|---|---|---|---|---|---|---|---|---|---|---|---|---|---|---|
| | 1114 | 1134 | 1135 | 1137 | 1139 | 1151 | 1180 | 1188 | 1211 | 1219 | 1221 | 1256 | 1264 | 1290 | 1318 | 1317 | 1320 | 1323 | 1333 |
| PAM | R | F | D | P | V | K | D | K | K | E | Q | Q | H | V | L | N | A | A | R |
| GAA | | | | | | | | | | V | H | | | | | | V | | K |
| GAA | | | N | S | | | | | | V | | | | | | | V | D | K |
| GAA | | | N | | | | | | | V | H | | Y | | | | V | | K |
| CAA | | | N | | | | | | | V | H | | Y | | | | V | | K |
| CAA | G | | N | S | | | | | | V | H | | Y | | | | V | | K |
| CAA | | | N | | | | | R | | V | H | | | | | | V | | K |
| CAA | | | N | | | | G | | R | V | H | | Y | | | | V | | K |
| CAA | | | N | | | | | | | V | H | | Y | | | | V | | K |
| AAA | | | N | | | | G | | | V | H | R | Y | | | | V | D | K |
| CAA | G | | N | | | | G | | | V | H | | Y | | | | V | D | K |
| CAA | | L | N | | | | G | | | V | H | | Y | | | T | V | D | K |
| TAA | G | | N | | | | G | | | V | H | | Y | G | S | | V | D | K |
| TAA | G | | N | | | E | G | | | V | H | | Y | | S | | V | | K |
| TAA | G | | N | | | | G | | | V | H | | Y | | S | | V | D | K |
| TAA | G | | N | | | | G | | R | V | H | | | | | | V | | K |
| TAA | | | N | | | | G | | R | V | H | | Y | | | | V | | K |
| TAA | G | | N | | A | | G | | | V | H | | | | | | V | | K |
| TAA | G | | N | | | | | | | V | H | | | | | | V | | K |

TABLE 3C

| | SpCas9 amino acid position | | | | | | | | | | |
|---|---|---|---|---|---|---|---|---|---|---|---|
| | 1114 | 1131 | 1135 | 1150 | 1156 | 1180 | 1191 | 1218 | 1219 | 1221 | 1227 |
| PAM | R | Y | D | E | K | D | K | G | E | Q | A |
| SacB.TAT | | | N | | | | N | | V | H | |
| SacB.TAT | | | N | | | | | S | V | H | |
| AAT | | | N | | | | | S | V | H | V |
| TAT | G | | N | | | G | | S | V | H | |
| TAT | G | | N | | | G | | S | V | H | |
| TAT | G | C | N | | | G | | S | V | H | |
| TAT | G | C | N | | | G | | S | V | H | |
| TAT | G | C | N | | | G | | S | V | H | |
| TAT | G | C | N | | E | G | | S | V | H | |
| TAT | G | C | N | V | | G | | S | V | H | |
| TAT | | C | N | | | G | | S | V | H | |
| TAT | G | C | N | | | G | | S | V | H | |

| | SpCas9 amino acid position | | | | | | | | |
|---|---|---|---|---|---|---|---|---|---|
| | 1249 | 1253 | 1286 | 1293 | 1320 | 1321 | 1332 | 1335 | 1339 |
| PAM | P | E | N | A | A | P | D | R | T |
| SacB.TAT | | | | | V | S | | L | |
| SacB.TAT | S | | | | | S | G | L | |
| AAT | S | | K | T | | S | G | L | I |
| TAT | S | K | | | | S | G | L | |
| TAT | S | | | | | S | G | L | |
| TAT | S | | | | | S | G | L | |
| TAT | S | | | | | S | G | L | |
| TAT | S | | | | | S | G | L | |
| TAT | S | | | | | S | G | L | |
| TAT | S | | | | | S | G | L | |
| TAT | S | | | | | S | G | L | |
| TAT | S | | | | | S | G | L | |

TABLE 3D

| | SpCas9 amino acid position | | | | | | | | | | | | | |
|---|---|---|---|---|---|---|---|---|---|---|---|---|---|---|
| | 1114 | 1127 | 1135 | 1180 | 1207 | 1219 | 1234 | 1286 | 1301 | 1332 | 1335 | 1337 | 1338 | 1349 |
| PAM | R | D | D | D | E | E | N | N | P | D | R | T | S | H |

| | | | | | | | | | | | | | |
|---|---|---|---|---|---|---|---|---|---|---|---|---|---|
| SacB.CAC | | | N | | | V | | | N | Q | N | | |
| AAC | G | | N | | | V | | | N | Q | N | | |
| AAC | G | | N | | | V | | | N | Q | N | | |
| TAC | G | | N | | | V | | | N | Q | N | | |
| TAC | G | | N | | | V | | H | N | Q | N | | |
| TAC | G | | N | | G | V | D | H | N | Q | N | | |
| TAC | G | | N | | | V | | | N | Q | N | | |
| TAC | G | G | N | E | | V | | H | N | Q | N | | |
| TAC | G | | N | | | V | | H | N | Q | N | | |
| TAC | G | | N | | | V | | | N | Q | N | T | R |

[0252] In some embodiments, the nucleic acid programmable DNA binding protein (napDNAbp) is a single effector of a microbial CRISPR-Cas system. Single effectors of microbial CRISPR-Cas systems include, without limitation, Cas9, Cpf1, Cas12b/C2c1, and Cas12c/C2c3. Typically, microbial CRISPR-Cas systems are divided into Class 1 and Class 2 systems. Class 1 systems have multisubunit effector complexes, while Class 2 systems have a single protein effector. For example, Cas9 and Cpf1 are Class 2 effectors. In addition to Cas9 and Cpf1, three distinct Class 2 CRISPR-Cas systems (Cas12b/C2c1, and Cas12c/C2c3) have been described by Shmakov et al., “Discovery and Functional Characterization of Diverse Class 2 CRISPR Cas Systems”, Mol. Cell. 2015 Nov. 5; 60(3): 385-397, the entire contents of which is hereby incorporated by reference. Effectors of two of the systems, Cas12b/C2c1, and Cas12c/C2c3, contain RuvC-like endonuclease domains related to Cpf1. A third system contains an effector with two predicated HEPN RNase domains. Production of mature CRISPR RNA is tracrRNA-independent, unlike production of CRISPR RNA by Cas12b/C2c1. Cas12b/C2c1 depends on both CRISPR RNA and tracrRNA for DNA cleavage.

[0253] In some embodiments, the napDNAbp is a circular permutant (e.g., SEQ ID NO: 238).

[0254] The crystal structure of Alicyclobaccillus acidoterrastris Cas12b/C2c1 (AacC2c1) has been reported in complex with a chimeric single-molecule guide RNA (sgRNA). See e.g., Liu et al., “C2c1-sgRNA Complex Structure Reveals RNA-Guided DNA Cleavage Mechanism”, Mol. Cell. 2017 Jan. 19; 65(2):310-322, the entire contents of which are hereby incorporated by reference. The crystal structure has also been reported in Alicyclobacillus acidoterrestris C2c1 bound to target DNAs as ternary complexes. See e.g., Yang et al., “PAM-dependent Target DNA Recognition and Cleavage by C2C1 CRISPR-Cas endonuclease”, Cell. 2016 Dec. 15; 167(7):1814-1828, the entire contents of which are hereby incorporated by reference. Catalytically competent conformations of AacC2c1, both with target and non-target DNA strands, have been captured independently positioned within a single RuvC catalytic pocket, with Cas12b/C2c1-mediated cleavage resulting in a staggered seven-nucleotide break of target DNA. Structural comparisons between Cas12b/C2c1 ternary complexes and previously identified Cas9 and Cpf1 counterparts demonstrate the diversity of mechanisms used by CRISPR-Cas9 systems.

[0255] In some embodiments, the nucleic acid programmable DNA binding protein (napDNAbp) of any of the fusion proteins provided herein may be a Cas12b/C2c1, or a Cas12c/C2c3 protein. In some embodiments, the napDNAbp is a Cas12b/C2c1 protein. In some embodiments, the napDNAbp is a Cas12c/C2c3 protein. In some embodiments, the napDNAbp comprises an amino acid sequence that is at least 85%, at least 90%, at least 91%, at least 92%, at least 93%, at least 94%, at least 95%, at least 96%, at least 97%, at least 98%, at least 99%, or at ease 99.5% identical to a naturally-occurring Cas12b/C2c1 or Cas12c/C2c3 protein. In some embodiments, the napDNAbp is a naturally-occurring Cas12b/C2c1 or Cas12c/C2c3 protein. In some embodiments, the napDNAbp comprises an amino acid sequence that is at least 85%, at least 90%, at least 91%, at least 92%, at least 93%, at least 94%, at least 95%, at least 96%, at least 97%, at least 98%, at least 99%, or at ease 99.5% identical to any one of the napDNAbp sequences provided herein. It should be appreciated that Cas12b/C2c1 or Cas12c/C2c3 from other bacterial species may also be used in accordance with the present disclosure.

[0256] In some embodiments, a napDNAbp refers to Cas12c. In some embodiments, the Cas12c protein is a Cas12c1 (SEQ ID NO: 239) or a variant of Cas12c1. In some embodiments, the Cas12 protein is a Cas12c2 (SEQ ID NO: 240) or a variant of Cas12c2. In some embodiments, the Cas12 protein is a Cas12c protein from Oleiphilus sp. HI0009 (i.e., OspCas12c; SEQ ID NO: 241) or a variant of OspCas12c. These Cas12c molecules have been described in Yan et al., “Functionally Diverse Type V CRISPR-Cas Systems,” Science, 2019 Jan. 4; 363: 88-91; the entire contents of which is hereby incorporated by reference. In some embodiments, the napDNAbp comprises an amino acid sequence that is at least 85%, at least 90%, at least 91%, at least 92%, at least 93%, at least 94%, at least 95%, at least 96%, at least 97%, at least 98%, at least 99%, or at least 99.5% identical to a naturally-occurring Cas12c1, Cas12c2, or OspCas12c protein. In some embodiments, the napDNAbp is a naturally-occurring Cas12c1, Cas12c2, or OspCas12c protein. In some embodiments, the napDNAbp comprises an amino acid sequence that is at least 85%, at least 90%, at least 91%, at least 92%, at least 93%, at least 94%, at least 95%, at least 96%, at least 97%, at least 98%, at least 99%, or at ease 99.5% identical to any Cas12c1, Cas12c2, or OspCas12c protein described herein. It should be appreciated that Cas12c1, Cas12c2, or OspCas12c from other bacterial species may also be used in accordance with the present disclosure.

[0257] In some embodiments, a napDNAbp refers to Cas12g, Cas12h, or Cas12i, which have been described in, for example, Yan et al., “Functionally Diverse Type V CRISPR-Cas Systems,” Science, 2019 Jan. 4; 363: 88-91; the entire contents of each is hereby incorporated by reference. Exemplary Cas12g, Cas12h, and Cas12i polypeptide sequences are provided in the Sequence Listing as SEQ ID NOs: 242-245. By aggregating more than 10 terabytes of sequence data, new classifications of Type V Cas proteins were identified that showed weak similarity to previously characterized Class V protein, including Cas12g, Cas12h, and Cas12i. In some embodiments, the Cas12 protein is a Cas12g or a variant of Cas12g. In some embodiments, the Cas12 protein is a Cas12h or a variant of Cas12h. In some embodiments, the Cas12 protein is a Cas12i or a variant of Cas12i. It should be appreciated that other RNA-guided DNA binding proteins may be used as a napDNAbp, and are within the scope of this disclosure. In some embodiments, the napDNAbp comprises an amino acid sequence that is at least 85%, at least 90%, at least 91%, at least 92%, at least 93%, at least 94%, at least 95%, at least 96%, at least 97%, at least 98%, at least 99%, or at least 99.5% identical to a naturally-occurring Cas12g, Cas12h, or Cas12i protein. In some embodiments, the napDNAbp is a naturally-occurring Cas12g, Cas12h, or Cas12i protein. In some embodiments, the napDNAbp comprises an amino acid sequence that is at least 85%, at least 90%, at least 91%, at least 92%, at least 93%, at least 94%, at least 95%, at least 96%, at least 97%, at least 98%, at least 99%, or at ease 99.5% identical to any Cas12g, Cas12h, or Cas12i protein described herein. It should be appreciated that Cas12g, Cas12h, or Cas12i from other bacterial species may also be used in accordance with the present disclosure. In some embodiments, the Cas12i is a Cas12i1 or a Cas12i2.

[0258] In some embodiments, the nucleic acid programmable DNA binding protein (napDNAbp) of any of the fusion proteins provided herein may be a Cas12j/CasΦ protein. Cas12j/CasΦ is described in Pausch et al., “CRISPR-CasΦ from huge phages is a hypercompact genome editor,” Science, 17 Jul. 2020, Vol. 369, Issue 6501, pp. 333-337, which is incorporated herein by reference in its entirety. In some embodiments, the napDNAbp comprises an amino acid sequence that is at least 85%, at least 90%, at least 91%, at least 92%, at least 93%, at least 94%, at least 95%, at least 96%, at least 97%, at least 98%, at least 99%, or at ease 99.5% identical to a naturally-occurring Cas12j/CasΦ protein. In some embodiments, the napDNAbp is a naturally-occurring Cas12j/CasΦ protein. In some embodiments, the napDNAbp is a nuclease inactive (“dead”) Cas12j/CasΦ protein. It should be appreciated that Cas12j/CasΦ from other species may also be used in accordance with the present disclosure.

Fusion Proteins with Internal Insertion

[0259] Provided herein are fusion proteins comprising a heterologous polypeptide fused to a nucleic acid programmable nucleic acid binding protein, for example, a napDNAbp. A heterologous polypeptide can be a polypeptide that is not found in the native or wild-type napDNAbp polypeptide sequence. The heterologous polypeptide can be fused to the napDNAbp at a C-terminal end of the napDNAbp, an N-terminal end of the napDNAbp, or inserted at an internal location of the napDNAbp. In some embodiments, the heterologous polypeptide is a deaminase (e.g., cytidine of adenosine deaminase) or a functional fragment thereof. For example, a fusion protein can comprise a deaminase flanked by an N-terminal fragment and a C-terminal fragment of a Cas9 or Cas12 (e.g., Cas12b/C2c1), polypeptide. In some embodiments, the cytidine deaminase is an APOBEC deaminase (e.g., APOBEC1). In some embodiments, the adenosine deaminase is a TadA (e.g., TadA*7.10 or TadA*8). In some embodiments, the TadA is a TadA*8 or a TadA*9. TadA sequences (e.g., TadA7.10 or TadA*8) as described herein are suitable deaminases for the above-described fusion proteins.

[0260] In some embodiments, the fusion protein comprises the structure:
[0261] NH₂-[N-terminal fragment of a napDNAbp]-[deaminase]-[C-terminal fragment of a napDNAbp]-COOH;
[0262] NH₂-[N-terminal fragment of a Cas9]-[adenosine deaminase]-[C-terminal fragment of a Cas9]-COOH;
[0263] NH₂-[N-terminal fragment of a Cas12]-[adenosine deaminase]-[C-terminal fragment of a Cas12]-COOH;
[0264] NH₂-[N-terminal fragment of a Cas9]-[cytidine deaminase]-[C-terminal fragment of a Cas9]-COOH;
[0265] NH₂-[N-terminal fragment of a Cas12]-[cytidine deaminase]-[C-terminal fragment of a Cas12]-COOH;
[0266] wherein each instance of “]-[” is an optional linker.

[0267] The deaminase can be a circular permutant deaminase. For example, the deaminase can be a circular permutant adenosine deaminase. In some embodiments, the deaminase is a circular permutant TadA, circularly permutated at amino acid residue 116, 136, or 65 as numbered in the TadA reference sequence.

[0268] The fusion protein can comprise more than one deaminase. The fusion protein can comprise, for example, 1, 2, 3, 4, 5 or more deaminases. In some embodiments, the fusion protein comprises one or two deaminase. The two or more deaminases in a fusion protein can be an adenosine deaminase, a cytidine deaminase, or a combination thereof. The two or more deaminases can be homodimers or heterodimers. The two or more deaminases can be inserted in tandem in the napDNAbp. In some embodiments, the two or more deaminases may not be in tandem in the napDNAbp.

[0269] In some embodiments, the napDNAbp in the fusion protein is a Cas9 polypeptide or a fragment thereof. The Cas9 polypeptide can be a variant Cas9 polypeptide. In some embodiments, the Cas9 polypeptide is a Cas9 nickase (nCas9) polypeptide or a fragment thereof. In some embodiments, the Cas9 polypeptide is a nuclease dead Cas9 (dCas9) polypeptide or a fragment thereof. The Cas9 polypeptide in a fusion protein can be a full-length Cas9 polypeptide. In some cases, the Cas9 polypeptide in a fusion protein may not be a full length Cas9 polypeptide. The Cas9 polypeptide can be truncated, for example, at a N-terminal or C-terminal end relative to a naturally-occurring Cas9 protein. The Cas9 polypeptide can be a circularly permuted Cas9 protein. The Cas9 polypeptide can be a fragment, a portion, or a domain of a Cas9 polypeptide, that is still capable of binding the target polynucleotide and a guide nucleic acid sequence.

[0270] In some embodiments, the Cas9 polypeptide is a Streptococcus pyogenes Cas9 (SpCas9), Staphylococcus aureus Cas9 (SaCas9), Streptococcus thermophilus 1 Cas9 (St1Cas9), or fragments or variants of any of the Cas9 polypeptides described herein.

[0271] In some embodiments, the fusion protein comprises an adenosine deaminase domain and a cytidine deaminase domain inserted within a Cas9. In some embodiments, an adenosine deaminase is fused within a Cas9 and a cytidine deaminase is fused to the C-terminus. In some embodiments, an adenosine deaminase is fused within Cas9 and a cytidine deaminase fused to the N-terminus. In some embodiments, a cytidine deaminase is fused within Cas9 and an adenosine deaminase is fused to the C-terminus. In some embodiments, a cytidine deaminase is fused within Cas9 and an adenosine deaminase fused to the N-terminus.

[0272] Exemplary structures of a fusion protein with an adenosine deaminase and a cytidine deaminase and a Cas9 are provided as follows:
[0273] NH₂-[Cas9(adenosine deaminase)]-[cytidine deaminase]-COOH;
[0274] NH₂-[cytidine deaminase]-[Cas9(adenosine deaminase)]-COOH;
[0275] NH₂-[Cas9(cytidine deaminase)]-[adenosine deaminase]-COOH; or
[0276] NH₂-[adenosine deaminase]-[Cas9(cytidine deaminase)]-COOH.

[0277] In some embodiments, the “-” used in the general architecture above indicates the presence of an optional linker.

[0278] In various embodiments, the catalytic domain has DNA modifying activity (e.g., deaminase activity), such as adenosine deaminase activity. In some embodiments, the adenosine deaminase is a TadA (e.g., TadA*7.10). In some embodiments, the TadA is a TadA*8. In some embodiments, a TadA*8 is fused within Cas9 and a cytidine deaminase is fused to the C-terminus. In some embodiments, a TadA*8 is fused within Cas9 and a cytidine deaminase fused to the N-terminus. In some embodiments, a cytidine deaminase is fused within Cas9 and a TadA*8 is fused to the C-terminus. In some embodiments, a cytidine deaminase is fused within Cas9 and a TadA*8 fused to the N-terminus. Exemplary structures of a fusion protein with a TadA*8 and a cytidine deaminase and a Cas9 are provided as follows:
[0279] NH₂-[Cas9(TadA*8)]-[cytidine deaminase]-COOH;
[0280] NH₂-[cytidine deaminase]-[Cas9(TadA*8)]-COOH;
[0281] NH₂-[Cas9(cytidine deaminase)]-[TadA*8]-COOH; or
[0282] NH₂-[TadA*8]-[Cas9(cytidine deaminase)]-COOH.

[0283] In some embodiments, the “-” used in the general architecture above indicates the presence of an optional linker.

[0284] The heterologous polypeptide (e.g., deaminase) can be inserted in the napDNAbp (e.g., Cas9 or Cas12 (e.g., Cas12b/C2c1)) at a suitable location, for example, such that the napDNAbp retains its ability to bind the target polynucleotide and a guide nucleic acid. A deaminase (e.g., adenosine deaminase, cytidine deaminase, or adenosine deaminase and cytidine deaminase) can be inserted into a napDNAbp without compromising function of the deaminase (e.g., base editing activity) or the napDNAbp (e.g., ability to bind to target nucleic acid and guide nucleic acid). A deaminase (e.g., adenosine deaminase, cytidine deaminase, or adenosine deaminase and cytidine deaminase) can be inserted in the napDNAbp at, for example, a disordered region or a region comprising a high temperature factor or B-factor as shown by crystallographic studies. Regions of a protein that are less ordered, disordered, or unstructured, for example solvent exposed regions and loops, can be used for insertion without compromising structure or function. A deaminase (e.g., adenosine deaminase, cytidine deaminase, or adenosine deaminase and cytidine deaminase) can be inserted in the napDNAbp in a flexible loop region or a solvent-exposed region. In some embodiments, the deaminase (e.g., adenosine deaminase, cytidine deaminase, or adenosine deaminase and cytidine deaminase) is inserted in a flexible loop of the Cas9 or the Cas12b/C2c1 polypeptide.

[0285] In some embodiments, the insertion location of a deaminase (e.g., adenosine deaminase, cytidine deaminase, or adenosine deaminase and cytidine deaminase) is determined by B-factor analysis of the crystal structure of Cas9 polypeptide. In some embodiments, the deaminase (e.g., adenosine deaminase, cytidine deaminase, or adenosine deaminase and cytidine deaminase) is inserted in regions of the Cas9 polypeptide comprising higher than average B-factors (e.g., higher B factors compared to the total protein or the protein domain comprising the disordered region). B-factor or temperature factor can indicate the fluctuation of atoms from their average position (for example, as a result of temperature-dependent atomic vibrations or static disorder in a crystal lattice). A high B-factor (e.g., higher than average B-factor) for backbone atoms can be indicative of a region with relatively high local mobility. Such a region can be used for inserting a deaminase without compromising structure or function. A deaminase (e.g., adenosine deaminase, cytidine deaminase, or adenosine deaminase and cytidine deaminase) can be inserted at a location with a residue having a Cα atom with a B-factor that is 50%, 60%, 70%, 80%, 90%, 100%, 110%, 120%, 130%, 140%, 150%, 160%, 170%, 180%, 190%, 200%, or greater than 200% more than the average B-factor for the total protein. A deaminase (e.g., adenosine deaminase, cytidine deaminase, or adenosine deaminase and cytidine deaminase) can be inserted at a location with a residue having a Cα atom with a B-factor that is 50%, 60%, 70%, 80%, 90%, 100%, 110%, 120%, 130%, 140%, 150%, 160%, 170%, 180%, 190%, 200% or greater than 200% more than the average B-factor for a Cas9 protein domain comprising the residue. Cas9 polypeptide positions comprising a higher than average B-factor can include, for example, residues 768, 792, 1052, 1015, 1022, 1026, 1029, 1067, 1040, 1054, 1068, 1246, 1247, and 1248 as numbered in the above Cas9 reference sequence. Cas9 polypeptide regions comprising a higher than average B-factor can include, for example, residues 792-872, 792-906, and 2-791 as numbered in the above Cas9 reference sequence.

[0286] A heterologous polypeptide (e.g., deaminase) can be inserted in the napDNAbp at an amino acid residue selected from the group consisting of: 768, 791, 792, 1015, 1016, 1022, 1023, 1026, 1029, 1040, 1052, 1054, 1067, 1068, 1069, 1246, 1247, and 1248 as numbered in the above Cas9 reference sequence, or a corresponding amino acid residue in another Cas9 polypeptide. In some embodiments, the heterologous polypeptide is inserted between amino acid positions 768-769, 791-792, 792-793, 1015-1016, 1022-1023, 1026-1027, 1029-1030, 1040-1041, 1052-1053, 1054-1055, 1067-1068, 1068-1069, 1247-1248, or 1248-1249 as numbered in the above Cas9 reference sequence or corresponding amino acid positions thereof. In some embodiments, the heterologous polypeptide is inserted between amino acid positions 769-770, 792-793, 793-794, 1016-1017, 1023-1024, 1027-1028, 1030-1031, 1041-1042, 1053-1054, 1055-1056, 1068-1069, 1069-1070, 1248-1249, or 1249-1250 as numbered in the above Cas9 reference sequence or corresponding amino acid positions thereof. In some embodiments, the heterologous polypeptide replaces an amino acid residue selected from the group consisting of: 768, 791, 792, 1015, 1016, 1022, 1023, 1026, 1029, 1040, 1052, 1054, 1067, 1068, 1069, 1246, 1247, and 1248 as numbered in the above Cas9 reference sequence, or a corresponding amino acid residue in another Cas9 polypeptide. It should be understood that the reference to the above Cas9 reference sequence with respect to insertion positions is for illustrative purposes. The insertions as discussed herein are not limited to the Cas9 polypeptide sequence of the above Cas9 reference sequence, but include insertion at corresponding locations in variant Cas9 polypeptides, for example a Cas9 nickase (nCas9), nuclease dead Cas9 (dCas9), a Cas9 variant lacking a nuclease domain, a truncated Cas9, or a Cas9 domain lacking partial or complete HNH domain.

[0287] A heterologous polypeptide (e.g., deaminase) can be inserted in the napDNAbp at an amino acid residue selected from the group consisting of: 768, 792, 1022, 1026, 1040, 1068, and 1247 as numbered in the above Cas9 reference sequence, or a corresponding amino acid residue in another Cas9 polypeptide. In some embodiments, the heterologous polypeptide is inserted between amino acid positions 768-769, 792-793, 1022-1023, 1026-1027, 1029-1030, 1040-1041, 1068-1069, or 1247-1248 as numbered in the above Cas9 reference sequence or corresponding amino acid positions thereof. In some embodiments, the heterologous polypeptide is inserted between amino acid positions 769-770, 793-794, 1023-1024, 1027-1028, 1030-1031, 1041-1042, 1069-1070, or 1248-1249 as numbered in the above Cas9 reference sequence or corresponding amino acid positions thereof. In some embodiments, the heterologous polypeptide replaces an amino acid residue selected from the group consisting of: 768, 792, 1022, 1026, 1040, 1068, and 1247 as numbered in the above Cas9 reference sequence, or a corresponding amino acid residue in another Cas9 polypeptide.

[0288] A heterologous polypeptide (e.g., deaminase) can be inserted in the napDNAbp at an amino acid residue as described herein, or a corresponding amino acid residue in another Cas9 polypeptide. In an embodiment, a heterologous polypeptide (e.g., deaminase) can be inserted in the napDNAbp at an amino acid residue selected from the group consisting of: 1002, 1003, 1025, 1052-1056, 1242-1247, 1061-1077, 943-947, 686-691, 569-578, 530-539, and 1060-1077 as numbered in the above Cas9 reference sequence, or a corresponding amino acid residue in another Cas9 polypeptide. The deaminase (e.g., adenosine deaminase, cytidine deaminase, or adenosine deaminase and cytidine deaminase) can be inserted at the N-terminus or the C-terminus of the residue or replace the residue. In some embodiments, the deaminase (e.g., adenosine deaminase, cytidine deaminase, or adenosine deaminase and cytidine deaminase) is inserted at the C-terminus of the residue.

[0289] In some embodiments, an adenosine deaminase (e.g., TadA) is inserted at an amino acid residue selected from the group consisting of: 1015, 1022, 1029, 1040, 1068, 1247, 1054, 1026, 768, 1067, 1248, 1052, and 1246 as numbered in the above Cas9 reference sequence, or a corresponding amino acid residue in another Cas9 polypeptide. In some embodiments, an adenosine deaminase (e.g., TadA) is inserted in place of residues 792-872, 792-906, or 2-791 as numbered in the above Cas9 reference sequence, or a corresponding amino acid residue in another Cas9 polypeptide. In some embodiments, the adenosine deaminase is inserted at the N-terminus of an amino acid selected from the group consisting of: 1015, 1022, 1029, 1040, 1068, 1247, 1054, 1026, 768, 1067, 1248, 1052, and 1246 as numbered in the above Cas9 reference sequence, or a corresponding amino acid residue in another Cas9 polypeptide. In some embodiments, the adenosine deaminase is inserted at the C-terminus of an amino acid selected from the group consisting of: 1015, 1022, 1029, 1040, 1068, 1247, 1054, 1026, 768, 1067, 1248, 1052, and 1246 as numbered in the above Cas9 reference sequence, or a corresponding amino acid residue in another Cas9 polypeptide. In some embodiments, the adenosine deaminase is inserted to replace an amino acid selected from the group consisting of: 1015, 1022, 1029, 1040, 1068, 1247, 1054, 1026, 768, 1067, 1248, 1052, and 1246 as numbered in the above Cas9 reference sequence, or a corresponding amino acid residue in another Cas9 polypeptide.

[0290] In some embodiments, a cytidine deaminase (e.g., APOBEC1) is inserted at an amino acid residue selected from the group consisting of: 1016, 1023, 1029, 1040, 1069, and 1247 as numbered in the above Cas9 reference sequence, or a corresponding amino acid residue in another Cas9 polypeptide. In some embodiments, the cytidine deaminase is inserted at the N-terminus of an amino acid selected from the group consisting of: 1016, 1023, 1029, 1040, 1069, and 1247 as numbered in the above Cas9 reference sequence, or a corresponding amino acid residue in another Cas9 polypeptide. In some embodiments, the cytidine deaminase is inserted at the C-terminus of an amino acid selected from the group consisting of: 1016, 1023, 1029, 1040, 1069, and 1247 as numbered in the above Cas9 reference sequence, or a corresponding amino acid residue in another Cas9 polypeptide. In some embodiments, the cytidine deaminase is inserted to replace an amino acid selected from the group consisting of: 1016, 1023, 1029, 1040, 1069, and 1247 as numbered in the above Cas9 reference sequence, or a corresponding amino acid residue in another Cas9 polypeptide.

[0291] In some embodiments, the deaminase (e.g., adenosine deaminase, cytidine deaminase, or adenosine deaminase and cytidine deaminase) is inserted at amino acid residue 768 as numbered in the above Cas9 reference sequence, or a corresponding amino acid residue in another Cas9 polypeptide. In some embodiments, the deaminase (e.g., adenosine deaminase, cytidine deaminase, or adenosine deaminase and cytidine deaminase) is inserted at the N-terminus of amino acid residue 768 as numbered in the above Cas9 reference sequence, or a corresponding amino acid residue in another Cas9 polypeptide. In some embodiments, the deaminase (e.g., adenosine deaminase, cytidine deaminase, or adenosine deaminase and cytidine deaminase) is inserted at the C-terminus of amino acid residue 768 as numbered in the above Cas9 reference sequence, or a corresponding amino acid residue in another Cas9 polypeptide. In some embodiments, the deaminase (e.g., adenosine deaminase, cytidine deaminase, or adenosine deaminase and cytidine deaminase) is inserted to replace amino acid residue 768 as numbered in the above Cas9 reference sequence, or a corresponding amino acid residue in another Cas9 polypeptide.

[0292] In some embodiments, the deaminase (e.g., adenosine deaminase, cytidine deaminase, or adenosine deaminase and cytidine deaminase) is inserted at amino acid residue 791 or is inserted at amino acid residue 792, as numbered in the above Cas9 reference sequence, or a corresponding amino acid residue in another Cas9 polypeptide. In some embodiments, the deaminase (e.g., adenosine deaminase, cytidine deaminase, or adenosine deaminase and cytidine deaminase) is inserted at the N-terminus of amino acid residue 791 or is inserted at the N-terminus of amino acid 792, as numbered in the above Cas9 reference sequence, or a corresponding amino acid residue in another Cas9 polypeptide. In some embodiments, the deaminase (e.g., adenosine deaminase, cytidine deaminase, or adenosine deaminase and cytidine deaminase) is inserted at the C-terminus of amino acid 791 or is inserted at the N-terminus of amino acid 792, as numbered in the above Cas9 reference sequence, or a corresponding amino acid residue in another Cas9 polypeptide. In some embodiments, the deaminase (e.g., adenosine deaminase, cytidine deaminase, or adenosine deaminase and cytidine deaminase) is inserted to replace amino acid 791, or is inserted to replace amino acid 792, as numbered in the above Cas9 reference sequence, or a corresponding amino acid residue in another Cas9 polypeptide.

[0293] In some embodiments, the deaminase (e.g., adenosine deaminase, cytidine deaminase, or adenosine deaminase and cytidine deaminase) is inserted at amino acid residue 1016 as numbered in the above Cas9 reference sequence, or a corresponding amino acid residue in another Cas9 polypeptide. In some embodiments, the deaminase (e.g., adenosine deaminase, cytidine deaminase, or adenosine deaminase and cytidine deaminase) is inserted at the N-terminus of amino acid residue 1016 as numbered in the above Cas9 reference sequence, or a corresponding amino acid residue in another Cas9 polypeptide. In some embodiments, the deaminase (e.g., adenosine deaminase, cytidine deaminase, or adenosine deaminase and cytidine deaminase) is inserted at the C-terminus of amino acid residue 1016 as numbered in the above Cas9 reference sequence, or a corresponding amino acid residue in another Cas9 polypeptide. In some embodiments, the deaminase (e.g., adenosine deaminase, cytidine deaminase, or adenosine deaminase and cytidine deaminase) is inserted to replace amino acid residue 1016 as numbered in the above Cas9 reference sequence, or a corresponding amino acid residue in another Cas9 polypeptide.

[0294] In some embodiments, the deaminase (e.g., adenosine deaminase, cytidine deaminase, or adenosine deaminase and cytidine deaminase) is inserted at amino acid residue 1022, or is inserted at amino acid residue 1023, as numbered in the above Cas9 reference sequence, or a corresponding amino acid residue in another Cas9 polypeptide. In some embodiments, the deaminase (e.g., adenosine deaminase, cytidine deaminase, or adenosine deaminase and cytidine deaminase) is inserted at the N-terminus of amino acid residue 1022 or is inserted at the N-terminus of amino acid residue 1023, as numbered in the above Cas9 reference sequence, or a corresponding amino acid residue in another Cas9 polypeptide. In some embodiments, the deaminase (e.g., adenosine deaminase, cytidine deaminase, or adenosine deaminase and cytidine deaminase) is inserted at the C-terminus of amino acid residue 1022 or is inserted at the C-terminus of amino acid residue 1023, as numbered in the above Cas9 reference sequence, or a corresponding amino acid residue in another Cas9 polypeptide. In some embodiments, the deaminase (e.g., adenosine deaminase, cytidine deaminase, or adenosine deaminase and cytidine deaminase) is inserted to replace amino acid residue 1022, or is inserted to replace amino acid residue 1023, as numbered in the above Cas9 reference sequence, or a corresponding amino acid residue in another Cas9 polypeptide.

[0295] In some embodiments, the deaminase (e.g., adenosine deaminase, cytidine deaminase, or adenosine deaminase and cytidine deaminase) is inserted at amino acid residue 1026, or is inserted at amino acid residue 1029, as numbered in the above Cas9 reference sequence, or a corresponding amino acid residue in another Cas9 polypeptide. In some embodiments, the deaminase (e.g., adenosine deaminase, cytidine deaminase, or adenosine deaminase and cytidine deaminase) is inserted at the N-terminus of amino acid residue 1026 or is inserted at the N-terminus of amino acid residue 1029, as numbered in the above Cas9 reference sequence, or a corresponding amino acid residue in another Cas9 polypeptide. In some embodiments, the deaminase (e.g., adenosine deaminase, cytidine deaminase, or adenosine deaminase and cytidine deaminase) is inserted at the C-terminus of amino acid residue 1026 or is inserted at the C-terminus of amino acid residue 1029, as numbered in the above Cas9 reference sequence, or a corresponding amino acid residue in another Cas9 polypeptide. In some embodiments, the deaminase (e.g., adenosine deaminase, cytidine deaminase, or adenosine deaminase and cytidine deaminase) is inserted to replace amino acid residue 1026, or is inserted to replace amino acid residue 1029, as numbered in the above Cas9 reference sequence, or corresponding amino acid residue in another Cas9 polypeptide.

[0296] In some embodiments, the deaminase (e.g., adenosine deaminase, cytidine deaminase, or adenosine deaminase and cytidine deaminase) is inserted at amino acid residue 1040 as numbered in the above Cas9 reference sequence, or a corresponding amino acid residue in another Cas9 polypeptide. In some embodiments, the deaminase (e.g., adenosine deaminase, cytidine deaminase, or adenosine deaminase and cytidine deaminase) is inserted at the N-terminus of amino acid residue 1040 as numbered in the above Cas9 reference sequence, or a corresponding amino acid residue in another Cas9 polypeptide. In some embodiments, the deaminase (e.g., adenosine deaminase, cytidine deaminase, or adenosine deaminase and cytidine deaminase) is inserted at the C-terminus of amino acid residue 1040 as numbered in the above Cas9 reference sequence, or a corresponding amino acid residue in another Cas9 polypeptide. In some embodiments, the deaminase (e.g., adenosine deaminase, cytidine deaminase, or adenosine deaminase and cytidine deaminase) is inserted to replace amino acid residue 1040 as numbered in the above Cas9 reference sequence, or a corresponding amino acid residue in another Cas9 polypeptide.

[0297] In some embodiments, the deaminase (e.g., adenosine deaminase, cytidine deaminase, or adenosine deaminase and cytidine deaminase) is inserted at amino acid residue 1052, or is inserted at amino acid residue 1054, as numbered in the above Cas9 reference sequence, or a corresponding amino acid residue in another Cas9 polypeptide. In some embodiments, the deaminase (e.g., adenosine deaminase, cytidine deaminase, or adenosine deaminase and cytidine deaminase) is inserted at the N-terminus of amino acid residue 1052 or is inserted at the N-terminus of amino acid residue 1054, as numbered in the above Cas9 reference sequence, or a corresponding amino acid residue in another Cas9 polypeptide. In some embodiments, the deaminase (e.g., adenosine deaminase, cytidine deaminase, or adenosine deaminase and cytidine deaminase) is inserted at the C-terminus of amino acid residue 1052 or is inserted at the C-terminus of amino acid residue 1054, as numbered in the above Cas9 reference sequence, or a corresponding amino acid residue in another Cas9 polypeptide. In some embodiments, the deaminase (e.g., adenosine deaminase, cytidine deaminase, or adenosine deaminase and cytidine deaminase) is inserted to replace amino acid residue 1052, or is inserted to replace amino acid residue 1054, as numbered in the above Cas9 reference sequence, or a corresponding amino acid residue in another Cas9 polypeptide.

[0298] In some embodiments, the deaminase (e.g., adenosine deaminase, cytidine deaminase, or adenosine deaminase and cytidine deaminase) is inserted at amino acid residue 1067, or is inserted at amino acid residue 1068, or is inserted at amino acid residue 1069, as numbered in the above Cas9 reference sequence, or a corresponding amino acid residue in another Cas9 polypeptide. In some embodiments, the deaminase (e.g., adenosine deaminase, cytidine deaminase, or adenosine deaminase and cytidine deaminase) is inserted at the N-terminus of amino acid residue 1067 or is inserted at the N-terminus of amino acid residue 1068 or is inserted at the N-terminus of amino acid residue 1069, as numbered in the above Cas9 reference sequence, or a corresponding amino acid residue in another Cas9 polypeptide. In some embodiments, the deaminase (e.g., adenosine deaminase, cytidine deaminase, or adenosine deaminase and cytidine deaminase) is inserted at the C-terminus of amino acid residue 1067 or is inserted at the C-terminus of amino acid residue 1068 or is inserted at the C-terminus of amino acid residue 1069, as numbered in the above Cas9 reference sequence, or a corresponding amino acid residue in another Cas9 polypeptide. In some embodiments, the deaminase (e.g., adenosine deaminase, cytidine deaminase, or adenosine deaminase and cytidine deaminase) is inserted to replace amino acid residue 1067, or is inserted to replace amino acid residue 1068, or is inserted to replace amino acid residue 1069, as numbered in the above Cas9 reference sequence, or a corresponding amino acid residue in another Cas9 polypeptide.

[0299] In some embodiments, the deaminase (e.g., adenosine deaminase, cytidine deaminase, or adenosine deaminase and cytidine deaminase) is inserted at amino acid residue 1246, or is inserted at amino acid residue 1247, or is inserted at amino acid residue 1248, as numbered in the above Cas9 reference sequence, or a corresponding amino acid residue in another Cas9 polypeptide. In some embodiments, the deaminase (e.g., adenosine deaminase, cytidine deaminase, or adenosine deaminase and cytidine deaminase) is inserted at the N-terminus of amino acid residue 1246 or is inserted at the N-terminus of amino acid residue 1247 or is inserted at the N-terminus of amino acid residue 1248, as numbered in the above Cas9 reference sequence, or a corresponding amino acid residue in another Cas9 polypeptide. In some embodiments, the deaminase (e.g., adenosine deaminase, cytidine deaminase, or adenosine deaminase and cytidine deaminase) is inserted at the C-terminus of amino acid residue 1246 or is inserted at the C-terminus of amino acid residue 1247 or is inserted at the C-terminus of amino acid residue 1248, as numbered in the above Cas9 reference sequence, or a corresponding amino acid residue in another Cas9 polypeptide. In some embodiments, the deaminase (e.g., adenosine deaminase, cytidine deaminase, or adenosine deaminase and cytidine deaminase) is inserted to replace amino acid residue 1246, or is inserted to replace amino acid residue 1247, or is inserted to replace amino acid residue 1248, as numbered in the above Cas9 reference sequence, or a corresponding amino acid residue in another Cas9 polypeptide.

[0300] In some embodiments, a heterologous polypeptide (e.g., deaminase) is inserted in a flexible loop of a Cas9 polypeptide. The flexible loop portions can be selected from the group consisting of 530-537, 569-570, 686-691, 943-947, 1002-1025, 1052-1077, 1232-1247, or 1298-1300 as numbered in the above Cas9 reference sequence, or a corresponding amino acid residue in another Cas9 polypeptide. The flexible loop portions can be selected from the group consisting of: 1-529, 538-568, 580-685, 692-942, 948-1001, 1026-1051, 1078-1231, or 1248-1297 as numbered in the above Cas9 reference sequence, or a corresponding amino acid residue in another Cas9 polypeptide.

[0301] A heterologous polypeptide (e.g., adenine deaminase) can be inserted into a Cas9 polypeptide region corresponding to amino acid residues: 1017-1069, 1242-1247, 1052-1056, 1060-1077, 1002-1003, 943-947, 530-537, 568-579, 686-691, 1242-1247, 1298-1300, 1066-1077, 1052-1056, or 1060-1077 as numbered in the above Cas9 reference sequence, or a corresponding amino acid residue in another Cas9 polypeptide.

[0302] A heterologous polypeptide (e.g., adenine deaminase) can be inserted in place of a deleted region of a Cas9 polypeptide. The deleted region can correspond to an N-terminal or C-terminal portion of the Cas9 polypeptide. In some embodiments, the deleted region corresponds to residues 792-872 as numbered in the above Cas9 reference sequence, or a corresponding amino acid residue in another Cas9 polypeptide. In some embodiments, the deleted region corresponds to residues 792-906 as numbered in the above Cas9 reference sequence, or a corresponding amino acid residue in another Cas9 polypeptide. In some embodiments, the deleted region corresponds to residues 2-791 as numbered in the above Cas9 reference sequence, or a corresponding amino acid residue in another Cas9 polypeptide. In some embodiments, the deleted region corresponds to residues 1017-1069 as numbered in the above Cas9 reference sequence, or corresponding amino acid residues thereof.

[0303] Exemplary internal fusions base editors are provided in Table 4 below:

TABLE 4
Insertion loci in Cas9 proteins

| BE ID | Modification | Other ID |
|---|---|---|
| IBE001 | Cas9 TadA ins 1015 | ISLAY01 |
| IBE002 | Cas9 TadA ins 1022 | ISLAY02 |
| IBE003 | Cas9 TadA ins 1029 | ISLAY03 |
| IBE004 | Cas9 TadA ins 1040 | ISLAY04 |
| IBE005 | Cas9 TadA ins 1068 | ISLAY05 |
| IBE006 | Cas9 TadA ins 1247 | ISLAY06 |
| IBE007 | Cas9 TadA ins 1054 | ISLAY07 |
| IBE008 | Cas9 TadA ins 1026 | ISLAY08 |
| IBE009 | Cas9 TadA ins 768 | ISLAY09 |
| IBE020 | delta HNH TadA 792 | ISLAY20 |
| IBE021 | N-term fusion single TadA helix truncated 165-end | ISLAY21 |
| IBE029 | TadA-Circular Permutant116 ins1067 | ISLAY29 |
| IBE031 | TadA- Circular Permutant 136 ins1248 | ISLAY31 |
| IBE032 | TadA- Circular Permutant 136ins 1052 | ISLAY32 |
| IBE035 | delta 792-872 TadA ins | ISLAY35 |
| IBE036 | delta 792-906 TadA ins | ISLAY36 |
| IBE043 | TadA-Circular Permutant 65 ins1246 | ISLAY43 |
| IBE044 | TadA ins C-term truncate2 791 | ISLAY44 |

[0304] A heterologous polypeptide (e.g., deamiinase) can be inserted within a structural or functional domain of a Cas9 polypeptide. A heterologous polypeptide (e.g., deamiinase) can be inserted between two structural or functional domains of a Cas9 polypeptide. A heterologous polypeptide (e.g., deamiinase) can be inserted in place of a structural or functional domain of a Cas9 polypeptide, for example, after deleting the domain from the Cas9 polypeptide. The structural or functional domains of a Cas9 polypeptide can include, for example, RuvC I, RuvC II, RuvC III, Rec1, Rec2, PI, orHFNK.

[0305] In some embodiments, the Cas9 polypeptide lacks one or more domains selected from the group consisting of: RuvC I, RuvC II, RuvC III, Rec1, Rec2, PI, or HNH domain. In some embodiments, the Cas9 polypeptide lacks a nuclease domain. In some embodiments, the Cas9 polypeptide lacks an HNH domain. In some embodiments, the Cas9 polypeptide lacks a portion of the HNH domain such that the Cas9 polypeptide has reduced or abolished HNH activity. In some embodiments, the Cas9 polypeptide comprises a deletion of the nuclease domain, and the deaminase is inserted to replace the nuclease domain. In some embodiments, the HNH domain is deleted and the deaminase is inserted in its place. In some embodiments, one or more of the RuvC domains is deleted and the deaminase is inserted in its place.

[0306] A fusion protein comprising a heterologous polypeptide can be flanked by a N-terminal and a C-terminal fragment of a napDNAbp. In some embodiments, the fusion protein comprises a deaminase flanked by a N-terminal fragment and a C-terminal fragment of a Cas9 polypeptide. The N terminal fragment or the C terminal fragment can bind the target polynucleotide sequence. The C-terminus of the N terminal fragment or the N-terminus of the C terminal fragment can comprise a part of a flexible loop of a Cas9 polypeptide. The C-terminus of the N terminal fragment or the N-terminus of the C terminal fragment can comprise a part of an alpha-helix structure of the Cas9 polypeptide. The N-terminal fragment or the C-terminal fragment can comprise a DNA binding domain. The N-terminal fragment or the C-terminal fragment can comprise a RuvC domain. The N-terminal fragment or the C-terminal fragment can comprise an HNH domain. In some embodiments, neither of the N-terminal fragment and the C-terminal fragment comprises an HNH domain.

[0307] In some embodiments, the C-terminus of the N terminal Cas9 fragment comprises an amino acid that is in proximity to a target nucleobase when the fusion protein deaminates the target nucleobase. In some embodiments, the N-terminus of the C terminal Cas9 fragment comprises an amino acid that is in proximity to a target nucleobase when the fusion protein deaminates the target nucleobase. The insertion location of different deaminases can be different in order to have proximity between the target nucleobase and an amino acid in the C-terminus of the N terminal Cas9 fragment or the N-terminus of the C terminal Cas9 fragment. For example, the insertion position of an deaminase can be at an amino acid residue selected from the group consisting of: 1015, 1022, 1029, 1040, 1068, 1247, 1054, 1026, 768, 1067, 1248, 1052, and 1246 as numbered in the above Cas9 reference sequence, or a corresponding amino acid residue in another Cas9 polypeptide.

[0308] The N-terminal Cas9 fragment of a fusion protein (i.e. the N-terminal Cas9 fragment flanking the deaminase in a fusion protein) can comprise the N-terminus of a Cas9 polypeptide. The N-terminal Cas9 fragment of a fusion protein can comprise a length of at least about: 100, 200, 300, 400, 500, 600, 700, 800, 900, 1000, 1100, 1200, or 1300 amino acids. The N-terminal Cas9 fragment of a fusion protein can comprise a sequence corresponding to amino acid residues: 1-56, 1-95, 1-200, 1-300, 1-400, 1-500, 1-600, 1-700, 1-718, 1-765, 1-780, 1-906, 1-918, or 1-1100 as numbered in the above Cas9 reference sequence, or a corresponding amino acid residue in another Cas9 polypeptide. The N-terminal Cas9 fragment can comprise a sequence comprising at least: 85%, at least 90%, at least 91%, at least 92%, at least 93%, at least 94%, at least 95%, at least 96%, at least 97%, at least 98%, at least 99%, or at least 99.5% sequence identity to amino acid residues: 1-56, 1-95, 1-200, 1-300, 1-400, 1-500, 1-600, 1-700, 1-718, 1-765, 1-780, 1-906, 1-918, or 1-1100 as numbered in the above Cas9 reference sequence, or a corresponding amino acid residue in another Cas9 polypeptide.

[0309] The C-terminal Cas9 fragment of a fusion protein (i.e. the C-terminal Cas9 fragment flanking the deaminase in a fusion protein) can comprise the C-terminus of a Cas9 polypeptide. The C-terminal Cas9 fragment of a fusion protein can comprise a length of at least about: 100, 200, 300, 400, 500, 600, 700, 800, 900, 1000, 1100, 1200, or 1300 amino acids. The C-terminal Cas9 fragment of a fusion protein can comprise a sequence corresponding to amino acid residues: 1099-1368, 918-1368, 906-1368, 780-1368, 765-1368, 718-1368, 94-1368, or 56-1368 as numbered in the above Cas9 reference sequence, or a corresponding amino acid residue in another Cas9 polypeptide. The N-terminal Cas9 fragment can comprise a sequence comprising at least: 85%, at least 90%, at least 91%, at least 92%, at least 93%, at least 94%, at least 95%, at least 96%, at least 97%, at least 98%, at least 99%, or at least 99.5% sequence identity to amino acid residues: 1099-1368, 918-1368, 906-1368, 780-1368, 765-1368, 718-1368, 94-1368, or 56-1368 as numbered in the above Cas9 reference sequence, or a corresponding amino acid residue in another Cas9 polypeptide.

[0310] The N-terminal Cas9 fragment and C-terminal Cas9 fragment of a fusion protein taken together may not correspond to a full-length naturally occurring Cas9 polypeptide sequence, for example, as set forth in the above Cas9 reference sequence.

[0311] The fusion protein described herein can effect targeted deamination with reduced deamination at non-target sites (e.g., off-target sites), such as reduced genome wide spurious deamination. The fusion protein described herein can effect targeted deamination with reduced bystander deamination at non-target sites. The undesired deamination or off-target deamination can be reduced by at least 30%, at least 40%, at least 50%, at least 60%, at least 70%, at least 80%, at least 90%, at least 95%, or at least 99% compared with, for example, an end terminus fusion protein comprising the deaminase fused to a N terminus or a C terminus of a Cas9 polypeptide. The undesired deamination or off-target deamination can be reduced by at least one-fold, at least two-fold, at least three-fold, at least four-fold, at least five-fold, at least tenfold, at least fifteen fold, at least twenty fold, at least thirty fold, at least forty fold, at least fifty fold, at least 60 fold, at least 70 fold, at least 80 fold, at least 90 fold, or at least hundred fold, compared with, for example, an end terminus fusion protein comprising the deaminase fused to a N terminus or a C terminus of a Cas9 polypeptide.

[0312] In some embodiments, the deaminase (e.g., adenosine deaminase, cytidine deaminase, or adenosine deaminase and cytidine deaminase) of the fusion protein deaminates no more than two nucleobases within the range of an R-loop. In some embodiments, the deaminase of the fusion protein deaminates no more than three nucleobases within the range of the R-loop. In some embodiments, the deaminase of the fusion protein deaminates no more than 2, 3, 4, 5, 6, 7, 8, 9, or 10 nucleobases within the range of the R-loop. An R-loop is a three-stranded nucleic acid structure including a DNA:RNA hybrid, a DNA:DNA or an RNA: RNA complementary structure and the associated with single-stranded DNA. As used herein, an R-loop may be formed when a target polynucleotide is contacted with a CRISPR complex or a base editing complex, wherein a portion of a guide polynucleotide, e.g. a guide RNA, hybridizes with and displaces with a portion of a target polynucleotide, e.g. a target DNA. In some embodiments, an R-loop comprises a hybridized region of a spacer sequence and a target DNA complementary sequence. An R-loop region may be of about 5, 6, 7, 8, 9, 10, 11, 12, 13, 14, 15, 16, 17, 18, 19, 20, 21, 22, 23, 24, 25, 26, 27, 28, 29, 30, 31, 32, 33, 34, 35, 36, 37, 38, 39, 40, 41, 42, 43, 44, 45, 46, 47, 48, 49, or 50 nucleobase pairs in length. In some embodiments, the R-loop region is about 20 nucleobase pairs in length. It should be understood that, as used herein, an R-loop region is not limited to the target DNA strand that hybridizes with the guide polynucleotide. For example, editing of a target nucleobase within an R-loop region may be to a DNA strand that comprises the complementary strand to a guide RNA, or may be to a DNA strand that is the opposing strand of the strand complementary to the guide RNA. In some embodiments, editing in the region of the R-loop comprises editing a nucleobase on non-complementary strand (protospacer strand) to a guide RNA in a target DNA sequence.

[0313] The fusion protein described herein can effect target deamination in an editing window different from canonical base editing. In some embodiments, a target nucleobase is from about 1 to about 20 bases upstream of a PAM sequence in the target polynucleotide sequence. In some embodiments, a target nucleobase is from about 2 to about 12 bases upstream of a PAM sequence in the target polynucleotide sequence. In some embodiments, a target nucleobase is from about 1 to 9 base pairs, about 2 to 10 base pairs, about 3 to 11 base pairs, about 4 to 12 base pairs, about 5 to 13 base pairs, about 6 to 14 base pairs, about 7 to 15 base pairs, about 8 to 16 base pairs, about 9 to 17 base pairs, about 10 to 18 base pairs, about 11 to 19 base pairs, about 12 to 20 base pairs, about 1 to 7 base pairs, about 2 to 8 base pairs, about 3 to 9 base pairs, about 4 to 10 base pairs, about 5 to 11 base pairs, about 6 to 12 base pairs, about 7 to 13 base pairs, about 8 to 14 base pairs, about 9 to 15 base pairs, about 10 to 16 base pairs, about 11 to 17 base pairs, about 12 to 18 base pairs, about 13 to 19 base pairs, about 14 to 20 base pairs, about 1 to 5 base pairs, about 2 to 6 base pairs, about 3 to 7 base pairs, about 4 to 8 base pairs, about 5 to 9 base pairs, about 6 to 10 base pairs, about 7 to 11 base pairs, about 8 to 12 base pairs, about 9 to 13 base pairs, about 10 to 14 base pairs, about 11 to 15 base pairs, about 12 to 16 base pairs, about 13 to 17 base pairs, about 14 to 18 base pairs, about 15 to 19 base pairs, about 16 to 20 base pairs, about 1 to 3 base pairs, about 2 to 4 base pairs, about 3 to 5 base pairs, about 4 to 6 base pairs, about 5 to 7 base pairs, about 6 to 8 base pairs, about 7 to 9 base pairs, about 8 to 10 base pairs, about 9 to 11 base pairs, about 10 to 12 base pairs, about 11 to 13 base pairs, about 12 to 14 base pairs, about 13 to 15 base pairs, about 14 to 16 base pairs, about 15 to 17 base pairs, about 16 to 18 base pairs, about 17 to 19 base pairs, about 18 to 20 base pairs away or upstream of the PAM sequence. In some embodiments, a target nucleobase is about 1, 2, 3, 4, 5, 6, 7, 8, 9, 10, 11, 12, 13, 14, 15, 16, 17, 18, 19, 20, or more base pairs away from or upstream of the PAM sequence. In some embodiments, a target nucleobase is about 1, 2, 3, 4, 5, 6, 7, 8, or 9 base pairs upstream of the PAM sequence. In some embodiments, a target nucleobase is about 2, 3, 4, or 6 base pairs upstream of the PAM sequence.

[0314] The fusion protein can comprise more than one heterologous polypeptide. For example, the fusion protein can additionally comprise one or more UGI domains and/or one or more nuclear localization signals. The two or more heterologous domains can be inserted in tandem. The two or more heterologous domains can be inserted at locations such that they are not in tandem in the NapDNAbp.

[0315] A fusion protein can comprise a linker between the deaminase and the napDNAbp polypeptide. The linker can be a peptide or a non-peptide linker. For example, the linker can be an XTEN, (GGGS)n (SEQ ID NO: 246), (GGGGS)n (SEQ ID NO: 247), (G)n, (EAAAK)n (SEQ ID NO: 248), (GGS)n, SGSETPGTSESATPES (SEQ ID NO: 249). In some embodiments, the fusion protein comprises a linker between the N-terminal Cas9 fragment and the deaminase. In some embodiments, the fusion protein comprises a linker between the C-terminal Cas9 fragment and the deaminase. In some embodiments, the N-terminal and C-terminal fragments of napDNAbp are connected to the deaminase with a linker. In some embodiments, the N-terminal and C-terminal fragments are joined to the deaminase domain without a linker. In some embodiments, the fusion protein comprises a linker between the N-terminal Cas9 fragment and the deaminase, but does not comprise a linker between the C-terminal Cas9 fragment and the deaminase. In some embodiments, the fusion protein comprises a linker between the C-terminal Cas9 fragment and the deaminase, but does not comprise a linker between the N-terminal Cas9 fragment and the deaminase.

[0316] In some embodiments, the napDNAbp in the fusion protein is a Cas12 polypeptide, e.g., Cas12b/C2c1, or a fragment thereof. The Cas12 polypeptide can be a variant Cas12 polypeptide. In other embodiments, the N- or C-terminal fragments of the Cas12 polypeptide comprise a nucleic acid programmable DNA binding domain or a RuvC domain. In other embodiments, the fusion protein contains a linker between the Cas12 polypeptide and the catalytic domain. In other embodiments, the amino acid sequence of the linker is GGSGGS (SEQ ID NO: 250) or GSSGSETPGTSESATPESSG (SEQ ID NO: 251). In other embodiments, the linker is a rigid linker. In other embodiments of the above aspects, the linker is encoded by GGAGGCTCTGGAGGAAGC (SEQ ID NO: 252) or GGCTCTTCTGGATCTGAAACACCTGGCACAAGCGAGAGCGCCACCCCTGAGAGCTCTGGC (SEQ ID NO: 253).

[0317] Fusion proteins comprising a heterologous catalytic domain flanked by N- and C-terminal fragments of a Cas12 polypeptide are also useful for base editing in the methods as described herein. Fusion proteins comprising Cas12 and one or more deaminase domains, e.g., adenosine deaminase, or comprising an adenosine deaminase domain flanked by Cas12 sequences are also useful for highly specific and efficient base editing of target sequences. In an embodiment, a chimeric Cas12 fusion protein contains a heterologous catalytic domain (e.g., adenosine deaminase, cytidine deaminase, or adenosine deaminase and cytidine deaminase) inserted within a Cas12 polypeptide. In some embodiments, the fusion protein comprises an adenosine deaminase domain and a cytidine deaminase domain inserted within a Cas12. In some embodiments, an adenosine deaminase is fused within Cas12 and a cytidine deaminase is fused to the C-terminus. In some embodiments, an adenosine deaminase is fused within Cas12 and a cytidine deaminase fused to the N-terminus. In some embodiments, a cytidine deaminase is fused within Cas12 and an adenosine deaminase is fused to the C-terminus. In some embodiments, a cytidine deaminase is fused within Cas12 and an adenosine deaminase fused to the N-terminus. Exemplary structures of a fusion protein with an adenosine deaminase and a cytidine deaminase and a Cas12 are provided as follows:
[0318] NH₂-[Cas12(adenosine deaminase)]-[cytidine deaminase]-COOH;
[0319] NH₂-[cytidine deaminase]-[Cas12(adenosine deaminase)]-COOH;
[0320] NH₂-[Cas12(cytidine deaminase)]-[adenosine deaminase]-COOH; or
[0321] NH₂-[adenosine deaminase]-[Cas12(cytidine deaminase)]-COOH;

[0322] In some embodiments, the “-” used in the general architecture above indicates the presence of an optional linker.

[0323] In various embodiments, the catalytic domain has DNA modifying activity (e.g., deaminase activity), such as adenosine deaminase activity. In some embodiments, the adenosine deaminase is a TadA (e.g., TadA*7.10). In some embodiments, the TadA is a TadA*8. In some embodiments, a TadA*8 is fused within Cas12 and a cytidine deaminase is fused to the C-terminus. In some embodiments, a TadA*8 is fused within Cas12 and a cytidine deaminase fused to the N-terminus. In some embodiments, a cytidine deaminase is fused within Cas12 and a TadA*8 is fused to the C-terminus. In some embodiments, a cytidine deaminase is fused within Cas12 and a TadA*8 fused to the N-terminus. Exemplary structures of a fusion protein with a TadA*8 and a cytidine deaminase and a Cas12 are provided as follows:
[0324] N-[Cas12(TadA*8)]-[cytidine deaminase]-C;
[0325] N-[cytidine deaminase]-[Cas12(TadA*8)]-C;
[0326] N-[Cas12(cytidine deaminase)]-[TadA*8]-C; or
[0327] N-[TadA*8]-[Cas12(cytidine deaminase)]-C.

[0328] In some embodiments, the “-” used in the general architecture above indicates the presence of an optional linker.

[0329] In other embodiments, the fusion protein contains one or more catalytic domains. In other embodiments, at least one of the one or more catalytic domains is inserted within the Cas12 polypeptide or is fused at the Cas12 N-terminus or C-terminus. In other embodiments, at least one of the one or more catalytic domains is inserted within a loop, an alpha helix region, an unstructured portion, or a solvent accessible portion of the Cas12 polypeptide. In other embodiments, the Cas12 polypeptide is Cas12a, Cas12b, Cas12c, Cas12d, Cas12e, Cas12g, Cas12h, Cas12i, or Cas12j/Cas4. In other embodiments, the Cas12 polypeptide has at least about 85% amino acid sequence identity to Bacillus hisashii Cas12b, Bacillus thermoamylovorans Cas12b, Bacillus sp. V3-13 Cas12b, or Alicyclobacillus acidiphilus Cas12b (SEQ ID NO: 254). In other embodiments, the Cas12 polypeptide has at least about 90% amino acid sequence identity to Bacillus hisashii Cas12b (SEQ ID NO: 255), Bacillus thermoamylovorans Cas12b, Bacillus sp. V3-13 Cas12b, or Alicyclobacillus acidiphilus Cas12b. In other embodiments, the Cas12 polypeptide has at least about 95% amino acid sequence identity to Bacillus hisashii Cas12b, Bacillus thermoamylovorans Cas12b (SEQ ID NO: 256), Bacillus sp. V3-13 Cas12b (SEQ ID NO: 257), or Alicyclobacillus acidiphilus Cas12b. In other embodiments, the Cas12 polypeptide contains or consists essentially of a fragment of Bacillus hisashii Cas12b, Bacillus thermoamylovorans Cas12b, Bacillus sp. V3-13 Cas12b, or Alicyclobacillus acidiphilus Cas12b. In embodiments, the Cas12 polypeptide contains BvCas12b (V4), which in some embodiments is expressed as 5′ mRNA Cap---5′ UTR--bhCas12b---STOP sequence---3′ UTR---120polyA tail (SEQ ID NOs: 258-260).

[0330] In other embodiments, the catalytic domain is inserted between amino acid positions 153-154, 255-256, 306-307, 980-981, 1019-1020, 534-535, 604-605, or 344-345 of BhCas12b or a corresponding amino acid residue of Cas12a, Cas12c, Cas12d, Cas12e, Cas12g, Cas12h, Cas12i, or Cas12j/CasΦ. In other embodiments, the catalytic domain is inserted between amino acids P153 and S154 of BhCas12b. In other embodiments, the catalytic domain is inserted between amino acids K255 and E256 of BhCas12b. In other embodiments, the catalytic domain is inserted between amino acids D980 and G981 of BhCas12b. In other embodiments, the catalytic domain is inserted between amino acids K1019 and L1020 of BhCas12b. In other embodiments, the catalytic domain is inserted between amino acids F534 and P535 of BhCas12b. In other embodiments, the catalytic domain is inserted between amino acids K604 and G605 of BhCas12b. In other embodiments, the catalytic domain is inserted between amino acids H344 and F345 of BhCas12b. In other embodiments, catalytic domain is inserted between amino acid positions 147 and 148, 248 and 249, 299 and 300, 991 and 992, or 1031 and 1032 of BvCas12b or a corresponding amino acid residue of Cas12a, Cas12c, Cas12d, Cas12e, Cas12g, Cas12h, Cas12i, or Cas12j/CasΦ. In other embodiments, the catalytic domain is inserted between amino acids P147 and D148 of BvCas12b. In other embodiments, the catalytic domain is inserted between amino acids G248 and G249 of BvCas12b. In other embodiments, the catalytic domain is inserted between amino acids P299 and E300 of BvCas12b. In other embodiments, the catalytic domain is inserted between amino acids G991 and E992 of BvCas12b. In other embodiments, the catalytic domain is inserted between amino acids K1031 and M1032 of BvCas12b. In other embodiments, the catalytic domain is inserted between amino acid positions 157 and 158, 258 and 259, 310 and 311, 1008 and 1009, or 1044 and 1045 of AaCas12b or a corresponding amino acid residue of Cas12a, Cas12c, Cas12d, Cas12e, Cas12g, Cas12h, Cas12i, or Cas12j/CasΦ. In other embodiments, the catalytic domain is inserted between amino acids P157 and G158 of AaCas12b. In other embodiments, the catalytic domain is inserted between amino acids V258 and G259 of AaCas12b. In other embodiments, the catalytic domain is inserted between amino acids D310 and P311 of AaCas12b. In other embodiments, the catalytic domain is inserted between amino acids G1008 and E1009 of AaCas12b. In other embodiments, the catalytic domain is inserted between amino acids G1044 and K1045 at of AaCas12b.

[0331] In other embodiments, the fusion protein contains a nuclear localization signal (e.g., a bipartite nuclear localization signal). In other embodiments, the amino acid sequence of the nuclear localization signal is MAPKKKRKVGIHGVPAA (SEQ ID NO: 261). In other embodiments of the above aspects, the nuclear localization signal is encoded by the following sequence:
[0332] ATGGCCCCAAAGAAGAAGCGGAAGGTCGGTATCCACGGAGTCCCAGCAGCC (SEQ ID NO: 262). In other embodiments, the Cas12b polypeptide contains a mutation that silences the catalytic activity of a RuvC domain. In other embodiments, the Cas12b polypeptide contains D574A, D829A and/or D952A mutations. In other embodiments, the fusion protein further contains a tag (e.g., an influenza hemagglutinin tag).

[0333] In some embodiments, the fusion protein comprises a napDNAbp domain (e.g., Cas12-derived domain) with an internally fused nucleobase editing domain (e.g., all or a portion of a deaminase domain, e.g., an adenosine deaminase domain). In some embodiments, the napDNAbp is a Cas12b. In some embodiments, the base editor comprises a BhCas12b domain with an internally fused TadA*8 domain inserted at the loci provided in Table 5 below.

TABLE 5
Insertion loci in Cas12b proteins

| | | Inserted |
|---|---|---|
| | Insertion site | between aa |
| BhCas12b | | |
| position 1 | 153 | PS |
| position 2 | 255 | KE |
| position 3 | 306 | DE |
| position 4 | 980 | DG |
| position 5 | 1019 | KL |
| position 6 | 534 | FP |
| position 7 | 604 | KG |
| position 8 | 344 | HF |
| BvCas12b | | |
| position 1 | 147 | PD |
| position 2 | 248 | GG |
| position 3 | 299 | PE |
| position 4 | 991 | GE |
| position 5 | 1031 | KM |
| AaCas12b | | |
| position 1 | 157 | PG |
| position 2 | 258 | VG |
| position 3 | 310 | DP |
| position 4 | 1008 | GE |
| position 5 | 1044 | GK |

[0334] By way of nonlimiting example, an adenosine deaminase (e.g., TadA*8.13) may be inserted into a BhCas12b to produce a fusion protein (e.g., TadA*8.13-BhCas12b) that effectively edits a nucleic acid sequence.

[0335] In some embodiments, the base editing system described herein is an ABE with TadA inserted into a Cas9. Polypeptide sequences of relevant ABEs with TadA inserted into a Cas9 are provided in the attached Sequence Listing as SEQ ID NOs: 263-308.

[0336] In some embodiments, adenosine deaminase base editors were generated to insert TadA or variants thereof into the Cas9 polypeptide at the identified positions.

[0337] Exemplary, yet nonlimiting, fusion proteins are described in International PCT Application Nos. PCT/US2020/016285 and U.S. Provisional Application Nos. 62/852,228 and 62/852,224, the contents of which are incorporated by reference herein in their entireties.

### A to G Editing

[0338] In some embodiments, a base editor described herein comprises an adenosine deaminase domain. Such an adenosine deaminase domain of a base editor can facilitate the editing of an adenine (A) nucleobase to a guanine (G) nucleobase by deaminating the A to form inosine (I), which exhibits base pairing properties of G. Adenosine deamiinase is capable of deaminating (i.e., removing an amine group) adenine of a deoxyadenosine residue in deoxyribonucleic acid (DNA). In some embodiments, an A-to-G base editor further comprises an inhibitor of inosine base excision repair, for example, a uracil glycosylase inhibitor (UGI) domain or a catalytically inactive inosine specific nuclease. Without wishing to be bound by any particular theory, the UGI domain or catalytically inactive inosine specific nuclease can inhibit or prevent base excision repair of a deaminated adenosine residue (e.g., inosine), which can improve the activity or efficiency of the base editor.

[0339] A base editor comprising an adenosine deaminase can act on any polynucleotide, including DNA, RNA and DNA-RNA hybrids. In certain embodiments, a base editor comprising an adenosine deaminase can deaminate a target A of a polynucleotide comprising RNA. For example, the base editor can comprise an adenosine deaminase domain capable of deaminating a target A of an RNA polynucleotide and/or a DNA-RNA hybrid polynucleotide. In an embodiment, an adenosine deaminase incorporated into a base editor comprises all or a portion of adenosine deaminase acting on RNA (ADAR, e.g., ADAR1 or ADAR2) or tRNA (ADAT). A base editor comprising an adenosine deaminase domain can also be capable of deaminating an A nucleobase of a DNA polynucleotide. In an embodiment an adenosine deaminase domain of a base editor comprises all or a portion of an ADAT comprising one or more mutations which permit the ADAT to deaminate a target A in DNA. For example, the base editor can comprise all or a portion of an ADAT from Escherichia coli (EcTadA) comprising one or more of the following mutations: D108N, A106V, D147Y, E155V, L84F, H123Y, I156F, or a corresponding mutation in another adenosine deaminase. Exemplary ADAT homolog polypeptide sequences are provided in the Sequence Listing as SEQ ID NOs: 1 and 309-315.

[0340] The adenosine deaminase can be derived from any suitable organism (e.g., E. coli). In some embodiments, the adenosine deaminase is from a prokaryote. In some embodiments, the adenosine deaminase is from a bacterium. In some embodiments, the adenosine deaminase is from Escherichia coli, Staphylococcus aureus. Salmonella typhi, Shewanella putrefaciens. Haemophilus influenzae. Caulobacter crescentus. or Bacillus subtilis. In some embodiments, the adenosine deaminase is from E. coli. In some embodiments, the adenine deaminase is a naturally-occurring adenosine deaminase that includes one or more mutations corresponding to any of the mutations provided herein (e.g., mutations in ecTadA). The corresponding residue in any homologous protein can be identified by e.g., sequence alignment and determination of homologous residues. The mutations in any naturally-occurring adenosine deaminase (e.g., having homology to ecTadA) that correspond to any of the mutations described herein (e.g., any of the mutations identified in ecTadA) can be generated accordingly.

[0341] In some embodiments, the adenosine deaminase comprises an amino acid sequence that is at least 60%, at least 65%, at least 70%, at least 75%, at least 80%, at least 85%, at least 90%, at least 95%, at least 96%, at least 97%, at least 98%, at least 99%, or at least 99.5% identical to any one of the amino acid sequences set forth in any of the adenosine deaminases provided herein. It should be appreciated that adenosine deaminases provided herein may include one or more mutations (e.g., any of the mutations provided herein). The disclosure provides any deaminase domains with a certain percent identify plus any of the mutations or combinations thereof described herein. In some embodiments, the adenosine deaminase comprises an amino acid sequence that has 1, 2, 3, 4, 5, 6, 7, 8, 9, 10, 11, 12, 13, 14, 15, 16, 17, 18, 19, 20, 21, 22, 21, 24, 25, 26, 27, 28, 29, 30, 31, 32, 33, 34, 35, 36, 37, 38, 39, 40, 41, 42, 43, 44, 45, 46, 47, 48, 49, 50, or more mutations compared to a reference sequence, or any of the adenosine deaminases provided herein. In some embodiments, the adenosine deaminase comprises an amino acid sequence that has at least 5, at least 10, at least 15, at least 20, at least 25, at least 30, at least 35, at least 40, at least 45, at least 50, at least 60, at least 70, at least 80, at least 90, at least 100, at least 110, at least 120, at least 130, at least 140, at least 150, at least 160, or at least 170 identical contiguous amino acid residues as compared to any one of the amino acid sequences known in the art or described herein.

[0342] It should be appreciated that any of the mutations provided herein (e.g., based on the TadA reference sequence) can be introduced into other adenosine deaminases, such as E. coli TadA (ecTadA), S. aureus TadA (saTadA), or other adenosine deaminases (e.g., bacterial adenosine deaminases). It would be apparent to the skilled artisan that additional deaminases may similarly be aligned to identify homologous amino acid residues that can be mutated as provided herein. Thus, any of the mutations identified in the TadA reference sequence can be made in other adenosine deaminases (e.g., ecTada) that have homologous amino acid residues. It should also be appreciated that any of the mutations provided herein can be made individually or in any combination in the TadA reference sequence or another adenosine deaminase.

[0343] In some embodiments, the adenosine deaminase comprises a D108X mutation in the TadA reference sequence, or a corresponding mutation in another adenosine deaminase, where X indicates any amino acid other than the corresponding amino acid in the wild-type adenosine deaminase. In some embodiments, the adenosine deaminase comprises a D18G, D108N, D108V, D108A, or D108Y mutation in TadA reference sequence, or a corresponding mutation in another adenosine deaminase. It should be appreciated, however, that additional deaminases may similarly be aligned to identify homologous amino acid residues that can be mutated as provided herein.

[0344] In some embodiments, the adenosine deaminase comprises an A106X mutation in TadA reference sequence, or a corresponding mutation in another adenosine deaminase, where X indicates any amino acid other than the corresponding amino acid in the wild-type adenosine deaminase. In some embodiments, the adenosine deaminase comprises an A106V mutation in TadA reference sequence, or a corresponding mutation in another adenosine deaminase (e.g., ecTadA).

[0345] In some embodiments, the adenosine deaminase comprises a E155X mutation in TadA reference sequence, or a corresponding mutation in another adenosine deaminase, where the presence of X indicates any amino acid other than the corresponding amino acid in the wild-type adenosine deaminase. In some embodiments, the adenosine deaminase comprises a E155D, E155G, or E155V mutation in TadA reference sequence, or a corresponding mutation in another adenosine deaminase (e.g., ecTadA).

[0346] In some embodiments, the adenosine deaminase comprises a D147X mutation in TadA reference sequence, or a corresponding mutation in another adenosine deaminase, where the presence of X indicates any amino acid other than the corresponding amino acid in the wild-type adenosine deaminase. In some embodiments, the adenosine deaminase comprises a D147Y, mutation in TadA reference sequence, or a corresponding mutation in another adenosine deaminase (e.g., ecTadA).

[0347] In some embodiments, the adenosine deaminase comprises an A106X, E155X, or D147X, mutation in the TadA reference sequence, or a corresponding mutation in another adenosine deaminase (e.g., ecTadA), where X indicates any amino acid other than the corresponding amino acid in the wild-type adenosine deaminase. In some embodiments, the adenosine deaminase comprises an E155D, E155G, or E155V mutation. In some embodiments, the adenosine deaminase comprises a D147Y.

[0348] It should also be appreciated that any of the mutations provided herein may be made individually or in any combination in ecTadA or another adenosine deaminase. For example, an adenosine deaminase may contain a D108N, a A16V, a E155V, and/or a D147Y mutation in TadA reference sequence, or a corresponding mutation in another adenosine deaminase (e.g., ecTadA). In some embodiments, an adenosine deaminase comprises the following group of mutations (groups of mutations are separated by a “;”) in TadA reference sequence, or corresponding mutations in another adenosine deaminase: D108N and A106V; D108N and E155V; D108N and D147Y; A106V and E155V; A106V and D147Y; E155V and D147Y; D108N, A106V, and E155V; D108N, A106V, and D147Y; D108N, E155V, and D147Y; A106V, E155V, and D147Y; and D108N, A106V, E155V, and D147Y. It should be appreciated, however, that any combination of corresponding mutations provided herein may be made in an adenosine deaminase (e.g., ecTadA).

[0349] In some embodiments, the adenosine deaminase comprises one or more of a H8X, T17X, L18X, W23X, L34X, W45X, R51X, A56X, E59X, E85X, M94X, I95X, V102X, F104X, A106X, R107X, D108X, K110X, M118X, N127X, A138X, F149X, M151X, R153X, Q154X, I156X, and/or K157X mutation in TadA reference sequence, or one or more corresponding mutations in another adenosine deaminase, where the presence of X indicates any amino acid other than the corresponding amino acid in the wild-type adenosine deaminase. In some embodiments, the adenosine deaminase comprises one or more of H8Y, T17S, L18E, W23L, L34S, W45L, R51H, A56E, or A56S, E59G, E85K, or E85G, M94L, I95L, V102A, F104L, A106V, R107C, or R107H, or R107P, D108G, or D108N, or D108V, or D108A, or D108Y, K110I, M118K, N127S, A138V, F149Y, M151V, R153C, Q154L, I156D, and/or K157R mutation in TadA reference sequence, or one or more corresponding mutations in another adenosine deaminase.

[0350] In some embodiments, the adenosine deaminase comprises one or more of a H8X, D108X, and/or N127X mutation in TadA reference sequence, or one or more corresponding mutations in another adenosine deaminase, where X indicates the presence of any amino acid. In some embodiments, the adenosine deaminase comprises one or more of a H8Y, D108N, and/or N127S mutation in TadA reference sequence, or one or more corresponding mutations in another adenosine deaminase.

[0351] In some embodiments, the adenosine deaminase comprises one or more of H8X, R26X, M61X, L68X, M70X, A106X, D108X, A109X, N127X, D147X, R152X, Q154X, E155X, K161X, Q163X, and/or T166X mutation in TadA reference sequence, or one or more corresponding mutations in another adenosine deaminase, where X indicates the presence of any amino acid other than the corresponding amino acid in the wild-type adenosine deaminase. In some embodiments, the adenosine deaminase comprises one or more of H8Y, R26W, M61I, L68Q, M70V, A106T, D108N, A109T, N127S, D147Y, R152C, Q154H or Q154R, E155G or E155V or E155D, K161Q, Q163H, and/or T166P mutation in TadA reference sequence, or one or more corresponding mutations in another adenosine deaminase.

[0352] In some embodiments, the adenosine deaminase comprises one, two, three, four, five, or six mutations selected from the group consisting of H8X, D108X, N127X, D147X, R152X, and Q154X in TadA reference sequence, or a corresponding mutation or mutations in another adenosine deaminase (e.g., ecTadA), where X indicates the presence of any amino acid other than the corresponding amino acid in the wild-type adenosine deaminase. In some embodiments, the adenosine deaminase comprises one, two, three, four, five, six, seven, or eight mutations selected from the group consisting of H8X, M61X, M70X, D108X, N127X, Q154X, E155X, and Q163X in TadA reference sequence, or a corresponding mutation or mutations in another adenosine deaminase (e.g., ecTadA), where X indicates the presence of any amino acid other than the corresponding amino acid in the wild-type adenosine deaminase. In some embodiments, the adenosine deaminase comprises one, two, three, four, or five, mutations selected from the group consisting of H8X, D108X, N127X, E155X, and T166X in TadA reference sequence, or a corresponding mutation or mutations in another adenosine deaminase (e.g., ecTadA), where X indicates the presence of any amino acid other than the corresponding amino acid in the wild-type adenosine deaminase.

[0353] In some embodiments, the adenosine deaminase comprises one, two, three, four, five, or six mutations selected from the group consisting of H8X, A106X, and D108X, or a corresponding mutation or mutations in another adenosine deaminase, where X indicates the presence of any amino acid other than the corresponding amino acid in the wild-type adenosine deaminase. In some embodiments, the adenosine deaminase comprises one, two, three, four, five, six, seven, or eight mutations selected from the group consisting of H8X, R26X, L68X, D108X, N127X, D147X, and E155X, or a corresponding mutation or mutations in another adenosine deaminase, where X indicates the presence of any amino acid other than the corresponding amino acid in the wild-type adenosine deaminase.

[0354] In some embodiments, the adenosine deaminase comprises one, two, three, four, five, six, or seven mutations selected from the group consisting of H8X, R126X, L68X, D108X, N127X, D147X, and E155X in TadA reference sequence, or a corresponding mutation or mutations in another adenosine deaminase, where X indicates the presence of any amino acid other than the corresponding amino acid in the wild-type adenosine deaminase. In some embodiments, the adenosine deaminase comprises one, two, three, four, or five mutations selected from the group consisting of H8X, D108X, A109X, N127X, and E155X in TadA reference sequence, or a corresponding mutation or mutations in another adenosine deaminase, where X indicates the presence of any amino acid other than the corresponding amino acid in the wild-type adenosine deaminase.

[0355] In some embodiments, the adenosine deaminase comprises one, two, three, four, five, or six mutations selected from the group consisting of H8Y, D108N, N127S, D147Y, R152C, and Q154H in TadA reference sequence, or a corresponding mutation or mutations in another adenosine deaminase (e.g., ecTadA). In some embodiments, the adenosine deaminase comprises one, two, three, four, five, six, seven, or eight mutations selected from the group consisting of H8Y, M61I, M70V, D108N, N127S, Q154R, E155G and Q163H in TadA reference sequence, or a corresponding mutation or mutations in another adenosine deaminase (e.g., ecTadA). In some embodiments, the adenosine deaminase comprises one, two, three, four, or five, mutations selected from the group consisting of H8Y, D108N, N127S, E155V, and T166P in TadA reference sequence, or a corresponding mutation or mutations in another adenosine deaminase (e.g., ecTadA). In some embodiments, the adenosine deaminase comprises one, two, three, four, five, or six mutations selected from the group consisting of H8Y, A106T, D108N, N127S, E155D, and K161Q in TadA reference sequence, or a corresponding mutation or mutations in another adenosine deaminase (e.g., ecTadA). In some embodiments, the adenosine deaminase comprises one, two, three, four, five, six, seven, or eight mutations selected from the group consisting of H8Y, R26W, L68Q, D108N, N127S, D147Y, and E155V in TadA reference sequence, or a corresponding mutation or mutations in another adenosine deaminase (e.g., ecTadA). In some embodiments, the adenosine deaminase comprises one, two, three, four, or five, mutations selected from the group consisting of H8Y, D108N, A109T, N127S, and E155G in TadA reference sequence, or a corresponding mutation or mutations in another adenosine deaminase (e.g., ecTadA).

[0356] In some embodiments, the adenosine deaminase comprises one or more of the or one or more corresponding mutations in another adenosine deaminase. In some embodiments, the adenosine deaminase comprises a D108N, D108G, or D108V mutation in TadA reference sequence, or corresponding mutations in another adenosine deaminase. In some embodiments, the adenosine deaminase comprises a A106V and D108N mutation in TadA reference sequence, or corresponding mutations in another adenosine deaminase. In some embodiments, the adenosine deaminase comprises R107C and D108N mutations in TadA reference sequence, or corresponding mutations in another adenosine deaminase. In some embodiments, the adenosine deaminase comprises a H8Y, D108N, N127S, D147Y, and Q154H mutation in TadA reference sequence, or corresponding mutations in another adenosine deaminase. In some embodiments, the adenosine deaminase comprises a H8Y, D108N, N127S, D147Y, and E155V mutation in TadA reference sequence, or corresponding mutations in another adenosine deaminase. In some embodiments, the adenosine deaminase comprises a D108N, D147Y, and E155V mutation in TadA reference sequence, or corresponding mutations in another adenosine deaminase. In some embodiments, the adenosine deaminase comprises a H8Y, D108N, and N127S mutation in TadA reference sequence, or corresponding mutations in another adenosine deaminase. In some embodiments, the adenosine deaminase comprises a A106V, D108N, D147Y, and E155V mutation in TadA reference sequence, or corresponding mutations in another adenosine deaminase (e.g., ecTadA).

[0357] In some embodiments, the adenosine deaminase comprises one or more of S2X, H8X, I49X, L84X, H123X, N127X, I156X, and/or K160X mutation in TadA reference sequence, or one or more corresponding mutations in another adenosine deaminase, where the presence of X indicates any amino acid other than the corresponding amino acid in the wild-type adenosine deaminase. In some embodiments, the adenosine deaminase comprises one or more of S2A, H8Y, I49F, L84F, H123Y, N127S, I156F, and/or K160S mutation in TadA reference sequence, or one or more corresponding mutations in another adenosine deaminase (e.g., ecTadA).

[0358] In some embodiments, the adenosine deaminase comprises an L84X mutation adenosine deaminase, where X indicates any amino acid other than the corresponding amino acid in the wild-type adenosine deaminase. In some embodiments, the adenosine deaminase comprises an L84F mutation in TadA reference sequence, or a corresponding mutation in another adenosine deaminase (e.g., ecTadA).

[0359] In some embodiments, the adenosine deaminase comprises an H123X mutation in TadA reference sequence, or a corresponding mutation in another adenosine deaminase, where X indicates any amino acid other than the corresponding amino acid in the wild-type adenosine deaminase. In some embodiments, the adenosine deaminase comprises an H123Y mutation in TadA reference sequence, or a corresponding mutation in another adenosine deaminase.

[0360] In some embodiments, the adenosine deaminase comprises an I156X mutation in TadA reference sequence, or a corresponding mutation in another adenosine deaminase, where X indicates any amino acid other than the corresponding amino acid in the wild-type adenosine deaminase. In some embodiments, the adenosine deaminase comprises an I156F mutation in TadA reference sequence, or a corresponding mutation in another adenosine deaminase.

[0361] In some embodiments, the adenosine deaminase comprises one, two, three, four, five, six, or seven mutations selected from the group consisting of L84X, A106X, D108X, H123X, D147X, E155X, and I156X in TadA reference sequence, or a corresponding mutation or mutations in another adenosine deaminase, where X indicates the presence of any amino acid other than the corresponding amino acid in the wild-type adenosine deaminase. In some embodiments, the adenosine deaminase comprises one, two, three, four, five, or six mutations selected from the group consisting of S2X, I49X, A106X, D108X, D147X, and E155X in TadA reference sequence, or a corresponding mutation or mutations in another adenosine deaminase, where X indicates the presence of any amino acid other than the corresponding amino acid in the wild-type adenosine deaminase. In some embodiments, the adenosine deaminase comprises one, two, three, four, or five mutations selected from the group consisting of H8X, A106X, D108X, N127X, and K160X in TadA reference sequence, or a corresponding mutation or mutations in another adenosine deaminase, where X indicates the presence of any amino acid other than the corresponding amino acid in the wild-type adenosine deaminase.

[0362] In some embodiments, the adenosine deaminase comprises one, two, three, four, five, six, or seven mutations selected from the group consisting of L84F, A106V, D108N, H123Y, D147Y, E155V, and I156F in TadA reference sequence, or a corresponding mutation or mutations in another adenosine deaminase. In some embodiments, the adenosine deaminase comprises one, two, three, four, five, or six mutations selected from the group consisting of S2A, I49F, A106V, D108N, D147Y, and E155V in TadA reference sequence.

[0363] In some embodiments, the adenosine deaminase comprises one, two, three, four, or five mutations selected from the group consisting of H8Y, A106T, D108N, N127S, and K160S in TadA reference sequence, or a corresponding mutation or mutations in another adenosine deaminase.

[0364] In some embodiments, the adenosine deaminase comprises one or more of a E25X, R26X, R107X, A142X, and/or A143X mutation in TadA reference sequence, or one or more corresponding mutations in another adenosine deaminase, where the presence of X indicates any amino acid other than the corresponding amino acid in the wild-type adenosine deaminase. In some embodiments, the adenosine deaminase comprises one or more of E25M, E25D, E25A, E25R, E25V, E25S, E25Y, R26G, R26N, R26Q, R26C, R26L, R26K, R107P, R107K, R107A, R107N, R107W, R107H, R107S, A142N, A142D, A142G, A143D, A143G, A143E, A143L, A143W, A143M, A143S, A143Q, and/or A143R mutation in TadA reference sequence, or one or more corresponding mutations in another adenosine deaminase. In some embodiments, the adenosine deaminase comprises one or more of the mutations described herein corresponding to TadA reference sequence, or one or more corresponding mutations in another adenosine deaminase.

[0365] In some embodiments, the adenosine deaminase comprises an E25X mutation in TadA reference sequence, or a corresponding mutation in another adenosine deaminase, where X indicates any amino acid other than the corresponding amino acid in the wild-type adenosine deaminase. In some embodiments, the adenosine deaminase comprises an E25M, E25D, E25A, E25R, E25V, E25S, or E25Y mutation in TadA reference sequence, or a corresponding mutation in another adenosine deaminase (e.g., ecTadA).

[0366] In some embodiments, the adenosine deaminase comprises an R26X mutation in TadA reference sequence, or a corresponding mutation in another adenosine deaminase, where X indicates any amino acid other than the corresponding amino acid in the wild-type adenosine deaminase. In some embodiments, the adenosine deaminase comprises R26G, R26N, R26Q, R26C, R26L, or R26K mutation in TadA reference sequence, or a corresponding mutation in another adenosine deaminase (e.g., ecTadA).

[0367] In some embodiments, the adenosine deaminase comprises an R107X mutation in TadA reference sequence, or a corresponding mutation in another adenosine deaminase, where X indicates any amino acid other than the corresponding amino acid in the wild-type adenosine deaminase. In some embodiments, the adenosine deaminase comprises an R107P, R107K, R107A, R107N, R107W, R107H, or R107S mutation in TadA reference sequence, or a corresponding mutation in another adenosine deaminase (e.g., ecTadA).

[0368] In some embodiments, the adenosine deaminase comprises an A142X mutation in TadA reference sequence, or a corresponding mutation in another adenosine deaminase, where X indicates any amino acid other than the corresponding amino acid in the wild-type adenosine deaminase. In some embodiments, the adenosine deaminase comprises an A142N, A142D, A142G, mutation in TadA reference sequence, or a corresponding mutation in another adenosine deaminase (e.g., ecTadA).

[0369] In some embodiments, the adenosine deaminase comprises an A143X mutation in TadA reference sequence, or a corresponding mutation in another adenosine deaminase, where X indicates any amino acid other than the corresponding amino acid in the wild-type adenosine deaminase. In some embodiments, the adenosine deaminase comprises an A143D, A143G, A143E, A143L, A143W, A143M, A143S, A143Q, and/or A143R mutation in TadA reference sequence, or a corresponding mutation in another adenosine deaminase (e.g., ecTadA).

[0370] In some embodiments, the adenosine deaminase comprises one or more of a H36X, N37X, P48X, I49X, R51X, M70X, N72X, D77X, E134X, S146X, Q154X, K157X, and/or K161X mutation in TadA reference sequence, or one or more corresponding mutations in another adenosine deaminase, where the presence of X indicates any amino acid other than the corresponding amino acid in the wild-type adenosine deaminase. In some embodiments, the adenosine deaminase comprises one or more of H36L, N37T, N37S, P48T, P48L, I49V, R51H, R51L, M70L, N72S, D77G, E134G, S146R, S146C, Q154H, K157N, and/or K161T mutation in TadA reference sequence, or one or more corresponding mutations in another adenosine deaminase (e.g., ecTadA).

[0371] In some embodiments, the adenosine deaminase comprises an H36X mutation in TadA reference sequence, or a corresponding mutation in another adenosine deaminase, where X indicates any amino acid other than the corresponding amino acid in the wild-type adenosine deaminase. In some embodiments, the adenosine deaminase comprises an H36L mutation in TadA reference sequence, or a corresponding mutation in another adenosine deaminase.

[0372] In some embodiments, the adenosine deaminase comprises an N37X mutation in TadA reference sequence, or a corresponding mutation in another adenosine deaminase, where X indicates any amino acid other than the corresponding amino acid in the wild-type adenosine deaminase. In some embodiments, the adenosine deaminase comprises an N37T or N37S mutation in TadA reference sequence, or a corresponding mutation in another adenosine deaminase.

[0373] In some embodiments, the adenosine deaminase comprises an P48X mutation in TadA reference sequence, or a corresponding mutation in another adenosine deaminase, where X indicates any amino acid other than the corresponding amino acid in the wild-type adenosine deaminase. In some embodiments, the adenosine deaminase comprises an P48T or P48L mutation in TadA reference sequence, or a corresponding mutation in another adenosine deaminase.

[0374] In some embodiments, the adenosine deaminase comprises an R51X mutation in TadA reference sequence, or a corresponding mutation in another adenosine deaminase, where X indicates any amino acid other than the corresponding amino acid in the wild-type adenosine deaminase. In some embodiments, the adenosine deaminase comprises an R51H or R51L mutation in TadA reference sequence, or a corresponding mutation in another adenosine deaminase.

[0375] In some embodiments, the adenosine deaminase comprises an S146X mutation in TadA reference sequence, or a corresponding mutation in another adenosine deaminase, where X indicates any amino acid other than the corresponding amino acid in the wild-type adenosine deaminase. In some embodiments, the adenosine deaminase comprises an S146R or S146C mutation in TadA reference sequence, or a corresponding mutation in another adenosine deaminase.

[0376] In some embodiments, the adenosine deaminase comprises an K157X mutation in TadA reference sequence, or a corresponding mutation in another adenosine deaminase, where X indicates any amino acid other than the corresponding amino acid in the wild-type adenosine deaminase. In some embodiments, the adenosine deaminase comprises a K157N mutation in TadA reference sequence, or a corresponding mutation in another adenosine deaminase.

[0377] In some embodiments, the adenosine deaminase comprises an P48X mutation in TadA reference sequence, or a corresponding mutation in another adenosine deaminase, where X indicates any amino acid other than the corresponding amino acid in the wild-type adenosine deaminase. In some embodiments, the adenosine deaminase comprises a P48S, P48T, or P48A mutation in TadA reference sequence, or a corresponding mutation in another adenosine deaminase.

[0378] In some embodiments, the adenosine deaminase comprises an A142X mutation in TadA reference sequence, or a corresponding mutation in another adenosine deaminase, where X indicates any amino acid other than the corresponding amino acid in the wild-type adenosine deaminase. In some embodiments, the adenosine deaminase comprises a A142N mutation in TadA reference sequence, or a corresponding mutation in another adenosine deaminase.

[0379] In some embodiments, the adenosine deaminase comprises an W23X mutation in TadA reference sequence, or a corresponding mutation in another adenosine deaminase, where X indicates any amino acid other than the corresponding amino acid in the wild-type adenosine deaminase. In some embodiments, the adenosine deaminase comprises a W23R or W23L mutation in TadA reference sequence, or a corresponding mutation in another adenosine deaminase.

[0380] In some embodiments, the adenosine deaminase comprises an R152X mutation in TadA reference sequence, or a corresponding mutation in another adenosine deaminase, where X indicates any amino acid other than the corresponding amino acid in the wild-type adenosine deaminase. In some embodiments, the adenosine deaminase comprises a R152P or R52H mutation in TadA reference sequence, or a corresponding mutation in another adenosine deaminase.

[0381] In one embodiment, the adenosine deaminase may comprise the mutations H36L, R51L, L84F, A106V, D108N, H123Y, S146C, D147Y, E155V, I156F, and K157N. In some embodiments, the adenosine deaminase comprises the following combination of mutations relative to TadA reference sequence, where each mutation of a combination is separated by a “_” and each combination of mutations is between parentheses:
[0382] (A106V_D108N),
[0383] (R107C_D108N),
[0384] (H8Y_D108N_N127S_D147Y_Q154H),
[0385] (H8Y_D108N_N127S_D147Y_E155V),
[0386] (D108N_D147Y_E155V),
[0387] (H8Y_D108N_N127S),
[0388] (H8Y_D108N_N127S_D147Y_Q154H),
[0389] (A106V_D108N_D147Y_E155V),
[0390] (D108Q_D147Y_E155V),
[0391] (D108M_D147Y_E155V),
[0392] (D108L_D147Y_E155V),
[0393] (D108K_D147Y_E155V),
[0394] (D108I_D147Y_E155V),
[0395] (D108F_D147Y_E155V),
[0396] (A106V_D108N_D147Y),
[0397] (A106V_D108M_D147Y_E155V),
[0398] (E59A_A106V_D108N_D147Y_E155V),
[0399] (E59A cat dead_A106V_D108N_D147Y_E155V),
[0400] (L84F_A106V_D108N_H123Y_D147Y_E155V_I156Y),
[0401] (L84F_A106V_D108N_H123Y_D147Y_E155V_I156F),
[0402] (D103A_D104N),
[0403] (G22P_D103A_D104N),
[0404] (D103A_D104N_S138A),
[0405] (R26G_L84F_A106V_R107H_D108N_H123Y_A142N_A143D_D147Y_E155V_I156F),
[0406] (E25G_R26G_L84F_A106V_R107H_D108N_H123Y_A142N_A143D_D147Y_E155V_I156F),
[0407] (E25D_R26G_L84F_A106V_R107K_D108N_H123Y_A142N_A143G_D147Y_E155V_I156F),
[0408] (R26Q_L84F_A106V_D108N_H123Y_A142N_D147Y_E155V_I156F),
[0409] (E25M_R26G_L84F_A106V_R107P_D108N_H123Y_A142N_A143D_D147Y_E155V_I156F),
[0410] (R26C_L84F_A106V_R107H_D108N_H123Y_A142N_D147Y_E155V_I156F),
[0411] (L84F_A106V_D108N_H123Y_A142N_A143L_D147Y_E155V_I156F),
[0412] (R26G_L84F_A106V_D108N_H123Y_A142N_D147Y_E155V_I156F),
[0413] (E25A_R26G_L84F_A106V_R107N_D108N_H123Y_A142N_A143E_D147Y_E155V_I156F),
[0414] (R26G_L84F_A106V_R107H_D108N_H123Y_A142N_A143D_D147Y_E155V_I156F),
[0415] (A106V_D108N_A142N_D147Y_E155V),
[0416] (R26G_A106V_D108N_A142N_D147Y_E155V),
[0417] (E25D_R26G_A106V_R107K_D108N_A142N_A143G_D147Y_E155V),
[0418] (R26G_A106V_D108N_R107H_A142N_A143D_D147Y_E155V),
[0419] (E25D_R26G_A106V_D108N_A142N_D147Y_E155V),
[0420] (A106V_R107K_D108N_A142N_D147Y_E155V),
[0421] (A106V_D108N_A142N_A143G_D147Y_E155V),
[0422] (A106V_D108N_A142N_A143L_D147Y_E155V),
[0423] (H36L_R51L_L84F_A106V_D108N_H123Y_S146C_D147Y_E155V_I156F_K157N),
[0424] (N37T_P48T_M70L_L84F_A106V_D108N_H123Y_D147Y_I49V_E155V_I156F),
[0425] (N37S_L84F_A106V_D108N_H123Y_D147Y_E155V_I156F_K161T),
[0426] (H36L_L84F_A106V_D108N_H123Y_D147Y_Q154H_E155V_I156F),
[0427] (N72S_L84F_A106V_D108N_H123Y_S146R_D147Y_E155V_I156F),
[0428] (H36L_P48L_L84F_A106V_D108N_H123Y_E134G_D147Y_E155V_I156F),
[0429] (H36L_L84F_A106V_D108N_H123Y_D147Y_E155V_1156F_K157N)
[0430] (H36L_L84F_A106V_D108N_H123Y_S146C_D147Y_E155V_I156F),
[0431] (L84F_A106V_D108N_H123Y_S146R_D147Y_E155V_I156F_K161T),
[0432] (N37S_R51H_D77G_L84F_A106V_D108N_H123Y_D147Y_E155V_I156F),
[0433] (R51L_L84F_A106V_D108N_H123Y_D147Y_E155V_I156F_K157N),
[0434] (D24G_Q71R_L84F_H96L_A106V_D108N_H123Y_D147Y_E155V_I156F_K160E),
[0435] (H36L_G67V_L84F_A106V_D108N_H123Y_S146T_D147Y_E155V_I156F),
[0436] (Q71L_L84F_A106V_D108N_H123Y_L137M_A143E_D147Y_E155V_I156F),
[0437] (E25G_L84F_A106V_D108N_H123Y_D147Y_E155V_I156F_Q159L),
[0438] (L84F_A91T_F104I_A106V_D108N_H123Y_D147Y_E155V_I156F),
[0439] (N72D_L84F_A106V_D108N_H123Y_G125A_D147Y_E155V_I156F),
[0440] (P48S_L84F_S97C_A106V_D108N_H123Y_D147Y_E155V_I156F),
[0441] (W23G_L84F_A106V_D108N_H123Y_D147Y_E155V_I156F),
[0442] (D24G_P48L_Q71R_L84F_A106V_D108N_H123Y_D147Y_E155V_I156F_Q159L),
[0443] (L84F_A106V_D108N_H123Y_A142N_D147Y_E155V_I156F),
[0444] (H36L_R51L_L84F_A106V_D108N_H123Y_A142N_S146C_D147Y_E155V_I156F_K157N),
[0445] (N37S_L84F_A106V_D108N_H123Y_A142N_D147Y_E155V_I156F_K161T),
[0446] (L84F_A106V_D108N_D147Y_E155V_I156F),
[0447] (R51L_L84F_A106V_D108N_H123Y_S146C_D147Y_E155V_I156F_K157N_K161T),
[0448] (L84F_A106V_D108N_H123Y_S146C_D147Y_E155V_I156F_K161T),
[0449] (L84F_A106V_D108N_H123Y_S146C_D147Y_E155V_I156F_K157N_K160E_K161T),
[0450] (L84F_A106V_D108N_H123Y_S146C_D147Y_E155V_I156F_K157N_K160E),
[0451] (R74Q_L84F_A106V_D108N_H123Y_D147Y_E155V_I156F),
[0452] (R74A_L84F_A106V_D108N_H123Y_D147Y_E155V_I156F),
[0453] (L84F_A106V_D108N_H123Y_D147Y_E155V_I156F),
[0454] (R74Q_L84F_A106V_D108N_H123Y_D147Y_E155V_I156F),
[0455] (L84F_R98Q_A106V_D108N_H123Y_D147Y_E155V_I156F),
[0456] (L84F_A106V_D108N_H123Y_R129Q_D147Y_E155V_I156F),
[0457] (P48S_L84F_A106V_D108N_H123Y_A142N_D147Y_E155V_I156F),
[0458] (P48S_A142N),
[0459] (P48T_I49V_L84F_A106V_D108N_H123Y_A142N_D147Y_E155V_I156F_L157N),
[0460] (P48T_I49V_A142N),
[0461] (H36L_P48S_R51L_L84F_A106V_D108N_H123Y_S146C_D147Y_E155V_I156F_K157N),
[0462] (H36L_P48S_R51L_L84F_A106V_D108N_H123Y_S146C_A142N_D147Y_E155V_I156F
[0463] (H36L_P48T_I49V_R51L_L84F_A106V_D108N_H123Y_S146C_D147Y_E155V_I156F_K157N),
[0464] (H36L_P48T_I49V_R51L_L84F_A106V_D108N_H123Y_A142N_S146C_D147Y_E155V_I156F_K157N),
[0465] (H36L_P48A_R51L_L84F_A106V_D108N_H123Y_S146C_D147Y_E155V_I156F_K157N),
[0466] (H36L_P48A_R51L_L84F_A106V_D108N_H123Y_A142N_S146C_D147Y_E155V_I156F_K157N),
[0467] (H36L_P48A_R51L_L84F_A106V_D108N_H123Y_S146C_A142N_D147Y_E155V_156F_K157N),
[0468] (W23L_H36L_P48A_R51L_L84F_A106V_D108N_H123Y_S146C_D147Y_E155V_I156F_K157N),
[0469] (W23R_H36L_P48A_R51L_L84F_A106V_D108N_H123Y_S146C_D147Y_E155V_I156F_K157N),
[0470] (W23L_H36L_P48A_R51L_L84F_A106V_D108N_H123Y_S146R_D147Y_E155V_I156F_K161T),
[0471] (H36L_P48A_R51L_L84F_A106V_D108N_H123Y_S146C_D147Y_R152H_E155V_I156F_K157N),
[0472] (H36L_P48A_R51L_L84F_A106V_D108N_H123Y_S146C_D147Y_R152P_E155V_I156F_K157N),
[0473] (W23L_H36L_P48A_R51L_L84F_A106V_D108N_H123Y_S146C_D147Y_R152P_E155V_I156F_K157N),
[0474] (W23L_H36L_P48A_R51L_L84F_A106V_D108N_H123Y_A142A_S146C_D147Y_E155V_I156F_K157N),
[0475] (W23L_H36L_P48A_R51L_L84F_A106V_D108N_H123Y_A142A_S146C_D147Y_R152P_E155V_I156F_K157N),
[0476] (W23L_H36L_P48A_R51L_L84F_A106V_D108N_H123Y_S146R_D147Y_E155V_I156F_K161T),
[0477] (W23R_H36L_P48A_R51L_L84F_A106V_D108N_H123Y_S146C_D147Y_R152P_E155V_I156F_K157N),
[0478] (H36L_P48A_R51L_L84F_A106V_D108N_H123Y_A142N_S146C_D147Y_R152P_E155 V_I156F_K157N).

[0479] In some embodiments, the TadA deaminase is TadA variant. In some embodiments, the TadA variant is TadA*7.10. In particular embodiments, the fusion proteins comprise a single TadA*7.10 domain (e.g., provided as a monomer). In other embodiments, the fusion protein comprises TadA*7.10 and TadA(wt), which are capable of forming heterodimers. In one embodiment, a fusion protein of the invention comprises a wild-type TadA linked to TadA*7.10, which is linked to Cas9 nickase.

[0480] In some embodiments, TadA*7.10 comprises at least one alteration. In some embodiments, the adenosine deaminase comprises an alteration in the following sequence:

TadA*7.10
(SEQ ID NO: 1)
MSEVEFSHEYWMRHALTLAKRARDEREVPVGAVLVLNNRVIGEGWNRAI
GLHDPTAHAEIMALRQGGLVMQNYRLIDATLYVTFEPCVMCAGAMIHSR
IGRVVFGVRNAKTGAAGSLMDVLHYPGMNHRVEITEGILADECAALLCY
FFRMPRQVFNAQKKAQSSTD.

[0481] In some embodiments, TadA*7.10 comprises an alteration at amino acid 82 and/or 166. In particular embodiments, TadA*7.10 comprises one or more of the following alterations: Y147T, Y147R, Q154S, Y123H, V82S, T166R, and/or Q154R In other embodiments, a variant of TadA*7.10 comprises a combination of alterations selected from the group of: Y147T+Q154R; Y147T+Q154S; Y147R+Q154S; V82S+Q154S; V82S+Y147R; V82S+Q154R; V82S+Y123H; I76Y+V82S; V82S+Y123H+Y147T; V82S+Y123H+Y147R; V82S+Y123H+Q154R; Y147R+Q154R+Y123H; Y147R+Q154R+I76Y; Y147R+Q154R+T166R; Y123H+Y147R+Q154R+I76Y; V82S+Y123H+Y147R+Q154R; and I76Y+V82S+Y123H+Y147R+Q154R.

[0482] In some embodiments, an adenosine deaminase variant (e.g., TadA*8) comprises a deletion. In some embodiments, an adenosine deaminase variant comprises a deletion of the C terminus. In particular embodiments, an adenosine deaminase variant comprises a deletion of the C terminus beginning at residue 149, 150, 151, 152, 153, 154, 155, 156, and 157, relative to TadA*7.10, the TadA reference sequence, or a corresponding mutation in another TadA.

[0483] In other embodiments, an adenosine deaminase variant (e.g., TadA*8) is a monomer comprising one or more of the following alterations: Y147T, Y147R, Q154S, Y123H, V82S, T166R, and/or Q154R, relative to TadA*7.10, the TadA reference sequence, or a corresponding mutation in another TadA. In other embodiments, the adenosine deaminase variant (TadA*8) is a monomer comprising a combination of alterations selected from the group of: Y147T+Q154R; Y147T+Q154S; Y147R+Q154S; V82S+Q154S; V82S+Y147R; V82S+Q154R; V82S+Y123H; I76Y+V82S; V82S+Y123H+Y147T; V82S+Y123H+Y147R; V82S+Y123H+Q154R; Y147R+Q154R+Y123H; Y147R+Q154R+I76Y; Y147R+Q154R+T166R; Y123H+Y147R+Q154R+I76Y; V82S+Y123H+Y147R+Q154R; and I76Y+V82S+Y123H+Y147R+Q154R, relative to TadA*7.10, the TadA reference sequence, or a corresponding mutation in another TadA.

[0484] In other embodiments, the adenosine deaminase variant is a homodimer comprising two adenosine deaminase domains (e.g., TadA*8) each having one or more of the following alterations Y147T, Y147R, Q154S, Y123H, V82S, T166R, and/or Q154R, relative to TadA*7.10, the TadA reference sequence, or a corresponding mutation in another TadA. In other embodiments, the adenosine deaminase variant is a homodimer comprising two adenosine deaminase domains (e.g., TadA*8) each having a combination of alterations selected from the group of: Y147T+Q154R; Y147T+Q154S; Y147R+Q154S; V82S+Q154S; V82S+Y147R; V82S+Q154R; V82S+Y123H; I76Y+V82S; V82S+Y123H+Y147T; V82S+Y123H+Y147R; V82S+Y123H+Q154R; Y147R+Q154R+Y123H; Y147R+Q154R+I76Y; Y147R+Q154R+T166R; Y123H+Y147R+Q154R+I76Y; V82S+Y123H+Y147R+Q154R; and I76Y+V82S+Y123H+Y147R+Q154R, relative to TadA*7.10, the TadA reference sequence, or a corresponding mutation in another TadA.

[0485] In other embodiments, the adenosine deaminase variant is a heterodimer of a wild-type adenosine deaminase domain and an adenosine deaminase variant domain (e.g., TadA*8) comprising one or more of the following alterations Y147T, Y147R, Q154S, Y123H, V82S, T166R, and/or Q154R, relative to TadA*7.10, the TadA reference sequence, or a corresponding mutation in another TadA. In other embodiments, the adenosine deaminase variant is a heterodimer of a wild-type adenosine deaminase domain and an adenosine deaminase variant domain (e.g., TadA*8) comprising a combination of alterations selected from the group of: Y147T+Q154R; Y147T+Q154S; Y147R+Q154S; V82S+Q154S; V82S+Y147R; V82S+Q154R; V82S+Y123H; I76Y+V82S; V82S+Y123H+Y147T; V82S+Y123H+Y147R; V82S+Y123H+Q154R; Y147R+Q154R+Y123H; Y147R+Q154R+I76Y; Y147R+Q154R+T166R; Y123H+Y147R+Q154R+I76Y; V82S+Y123H+Y147R+Q154R; and I76Y+V82S+Y123H+Y147R+Q154R, relative to TadA*7.10, the TadA reference sequence, or a corresponding mutation in another TadA.

[0486] In other embodiments, the adenosine deaminase variant is a heterodimer of a TadA*7.10 domain and an adenosine deaminase variant domain (e.g., TadA*8) comprising one or more of the following alterations Y147T, Y147R, Q154S, Y123H, V82S, T166R, and/or Q154R, relative to TadA*7.10, the TadA reference sequence, or a corresponding mutation in another TadA. In other embodiments, the adenosine deaminase variant is a heterodimer of a TadA*7.10 domain and an adenosine deaminase variant domain (e.g., TadA*8) comprising a combination of alterations selected from the group of: Y147T+Q154R; Y147T+Q154S; Y147R+Q154S; V82S+Q154S; V82S+Y147R; V82S+Q154R; V82S+Y123H; I76Y+V82S; V82S+Y123H+Y147T; V82S+Y123H+Y147R; V82S+Y123H+Q154R; Y147R+Q154R+Y123H; Y147R+Q154R+176Y; Y147R+Q154R+T166R; Y123H+Y147R+Q154R+I76Y; V82S+Y123H+Y147R+Q154R; and I76Y+V82S+Y123H+Y147R+Q154R, relative to TadA*7.10, the TadA reference sequence, or a corresponding mutation in another TadA.

[0487] In particular embodiments, an adenosine deaminase heterodimer comprises a TadA*8 domain and an adenosine deaminase domain selected from Staphylococcus aureus (S. aureus) TadA, Bacillus subtilis (B. subtilis) TadA, Salmonella typhimurium (S. typhimurium) TadA, Shewanella putrefaciens (S. putrefaciens) TadA, Haemophilus influenzae F3031 (H. influenzae) TadA, Caulobacter crescentus (C. crescentus) TadA, Geobacter sulfurreducens (G. sulfurreducens) TadA, or TadA*7.10.

[0488] In some embodiments, an adenosine deaminase is a TadA*8. In one embodiment, an adenosine deaminase is a TadA*8 that comprises or consists essentially of the following sequence or a fragment thereof having adenosine deaminase activity:

(SEQ ID NO: 316)
MSEVEFSHEYWMRHALTLAKRARDEREVPVGAVLVLNNRVIGEGWNRAI
GLHDPTAHAEIMALRQGGLVMQNYRLIDATLYVTFEPCVMCAGAMIHSR
IGRVVFGVRNAKTGAAGSLMDVLHYPGMNHRVEITEGILADECAALLCT
FFRMPRQVFNAQKKAQSSTD.

[0489] In some embodiments, the TadA*8 is truncated. In some embodiments, the truncated TadA*8 is missing 1, 2, 3, 4, 5, 6, 7, 8, 9, 10, 11, 12, 13, 14, 15, 6, 17, 18, 19, or 20 N-terminal amino acid residues relative to the full length TadA*8. In some embodiments, the truncated TadA*8 is missing 1, 2, 3, 4, 5, 6, 7, 8, 9, 10, 11, 12, 13, 14, 15, 6, 17, 18, 19, or 20 C-terminal amino acid residues relative to the full length TadA*8. In some embodiments the adenosine deaminase variant is a full-length TadA*8.

[0490] In some embodiments the TadA*8 is TadA*8.1, TadA*8.2, TadA*8.3, TadA*8.4, TadA*8.5, TadA*8.6, TadA*8.7, TadA*8.8, TadA*8.9, TadA*8.10, TadA*8.11, TadA*8.12, TadA*8.13, TadA*8.14, TadA*8.15, TadA*8.16, TadA*8.17, TadA*8.18, TadA*8.19, TadA*8.20, TadA*8.21, TadA*8.22, TadA*8.23, or TadA*8.24.

[0491] In other embodiments, a base editor of the disclosure comprising an adenosine deaminase variant (e.g., TadA*8) monomer comprising one or more of the following alterations: R26C, V88A, A109S, T111R, D119N, H122N, Y147D, F149Y, T1661 and/or D167N, relative to TadA*7.10, the TadA reference sequence, or a corresponding mutation in another TadA. In other embodiments, the adenosine deaminase variant (TadA*8) monomer comprises a combination of alterations selected from the group of: R26C+A109S+T111R+D119N+H122N+Y147D+F149Y+T166I+D167N; V88A+A109S+T111R+D119N+H122N+F149Y+T166I+D167N; R26C+A109S+T111R+D119N+H122N+F149Y+T166I+D167N; V88A+T111R+D119N+F149Y; and A109S+T111R+D119N+H122N+Y147D+F149Y+T166I+D167N, relative to TadA*7.10, the TadA reference sequence, or a corresponding mutation in another TadA.

[0492] In other embodiments, a base editor comprises a heterodimer of a wild-type adenosine deaminase domain and an adenosine deaminase variant domain (e.g., TadA*8) comprising one or more of the following alterations R26C, V88A, A109S, T1I1R, D119N, H122N, Y147D, F149Y, T166I and/or D167N, relative to TadA*7.10, the TadA reference sequence, or a corresponding mutation in another TadA. In other embodiments, the base editor comprises a heterodimer of a wild-type adenosine deaminase domain and an adenosine deaminase variant domain (e.g., TadA*8) comprising a combination of alterations selected from the group of: R26C+A109S+T111R+D119N+H122N+Y147D+F149Y+T166I+D167N; V88A+A109S+T111R+D119N+H122N+F149Y+T166I+D167N; R26C+A109S+T111R+D119N+H122N+F149Y+T166I+D167N; V88A+T111R+D119N+F149Y; and A109S+T111R+D119N+H122N+Y147D+F149Y+T166I+D167N, relative to TadA*7.10, the TadA reference sequence, or a corresponding mutation in another TadA.

[0493] In other embodiments, a base editor comprises a heterodimer of a TadA*7.10 domain and an adenosine deaminase variant domain (e.g., TadA*8) comprising one or more of the following alterations R26C, V88A, A109S, T111R, D119N, H122N, Y147D, F149Y, T166I and/or D167N, relative to TadA*7.10, the TadA reference sequence, or a corresponding mutation in another TadA. In other embodiments, the base editor comprises a heterodimer of a TadA*7.10 domain and an adenosine deaminase variant domain (e.g., TadA*8) comprising a combination of alterations selected from the group of: R26C+A109S+T111R+D119N+H122N+Y147D+F149Y+T166I+D167N; V88A+A109S+T111R+D119N+H122N+F149Y+T166I+D167N; R26C+A109S+T111R+D119N+H122N+F149Y+T166I+D167N; V88A+T111R+D119N+F149Y; and A109S+T111R+D119N+H122N+Y147D+F149Y+T166I+D167N, relative to TadA*7.10, the TadA reference sequence, or a corresponding mutation in another TadA.

[0494] In some embodiments, the TadA*8 is a variant as shown in Table 6. Table 6 shows certain amino acid position numbers in the TadA amino acid sequence and the amino acids present in those positions in the TadA-7.10 adenosine deaminase. Table 6 also shows amino acid changes in TadA variants relative to TadA-7.10 following phage-assisted non-continuous evolution (PANCE) and phage-assisted continuous evolution (PACE), as described in M. Richter et al., 2020, Nature Biotechnology, doi.org/10.1038/s41587-020-0453-z, the entire contents of which are incorporated by reference herein. In some embodiments, the TadA*8 is TadA*8a, TadA*8b, TadA*8c, TadA*8d, or TadA*8e. In some embodiments, the TadA*8 is TadA*8e.

TABLE 6
Select TadA*8 Variants

| | | TadA amino acid number | | | | | | | | | |
|---|---|---|---|---|---|---|---|---|---|---|---|
| | TadA | 26 | 88 | 109 | 111 | 119 | 122 | 147 | 149 | 166 | 167 |
| | TadA-7.10 | R | V | A | T | D | H | Y | F | T | D |
| PANCE 1 | | | | | R | | | | | | |
| PANCE 2 | | | | S/T | R | | | | | | |
| PACE | TadA-8a | C | | S | R | N | N | D | Y | I | N |
| | TadA-8b | | A | S | R | N | N | | Y | I | N |
| | TadA-8c | C | | S | R | N | N | | Y | I | N |
| | TadA-8d | | A | | R | N | | | Y | | |
| | TadA-8e | | | S | R | N | N | D | Y | I | N |

[0495] In one embodiment, a fusion protein of the invention comprises a wild-type TadA is linked to an adenosine deaminase variant described herein (e.g., TadA*8), which is linked to Cas9 nickase. In particular embodiments, the fusion proteins comprise a single TadA*8 domain (e.g., provided as a monomer). In other embodiments, the fusion protein comprises TadA*8 and TadA(wt), which are capable of forming heterodimers.

[0496] In some embodiments, the adenosine deaminase comprises an amino acid sequence that is at least 60%, at least 65%, at least 70%, at least 75%, at least 80%, at least 85%, at least 90%, at least 95%, at least 96%, at least 97%, at least 98%, at least 99%, or at least 99.5% identical to any one of the amino acid sequences set forth in any of the adenosine deaminases provided herein. It should be appreciated that adenosine deaminases provided herein may include one or more mutations (e.g., any of the mutations provided herein). The disclosure provides any deaminase domains with a certain percent identity plus any of the mutations or combinations thereof described herein. In some embodiments, the adenosine deaminase comprises an amino acid sequence that has 1, 2, 3, 4, 5, 6, 7, 8, 9, 10, 11, 12, 13, 14, 15, 16, 17, 18, 19, 20, 21, 22, 21, 24, 25, 26, 27, 28, 29, 30, 31, 32, 33, 34, 35, 36, 37, 38, 39, 40, 41, 42, 43, 44, 45, 46, 47, 48, 49, 50, or more mutations compared to a reference sequence, or any of the adenosine deaminases provided herein. In some embodiments, the adenosine deaminase comprises an amino acid sequence that has at least 5, at least 10, at least 15, at least 20, at least 25, at least 30, at least 35, at least 40, at least 45, at least 50, at least 60, at least 70, at least 80, at least 90, at least 100, at least 110, at least 120, at least 130, at least 140, at least 150, at least 160, or at least 170 identical contiguous amino acid residues as compared to any one of the amino acid sequences known in the art or described herein.

[0497] In particular embodiments, a TadA*8 comprises one or more mutations at any of the following positions shown in bold. In other embodiments, a TadA*8 comprises one or more mutations at any of the positions shown with underlining:

| (SEQ ID NO: 1) | |
|---|---|
| MSEVEFSHEY WMRHALTLAK RARDEREVPV GAVLVLNNRV IGEGWNRAIG | 50 |
| LHDPTAHAEI MALRQGGLVM QNYRLIDATL YVTFEPCVMC AGAMIHSRIG | 100 |
| RVVFGVRNAK TGAAGSLMDV LHYPGMNHRV EITEGILADE CAALLCYFFR | 150 |
| MPRQVFNAQK KAQSSTD | |

[0498] For example, the TadA*8 comprises alterations at amino acid position 82 and/or 166 (e.g., V82S, T166R) alone or in combination with any one or more of the following Y147T, Y147R, Q154S, Y123H, and/or Q154R, relative to TadA*7.10, the TadA reference sequence, or a corresponding mutation in another TadA. In particular embodiments, a combination of alterations is selected from the group of: Y147T+Q154R; Y147T+Q154S; Y147R+Q154S; V82S+Q154S; V82S+Y147R; V82S+Q154R; V82S+Y123H; I76Y+V82S; V82S+Y123H+Y147T; V82S+Y123H+Y147R; V82S+Y123H+Q154R; Y147R+Q154R+Y123H; Y147R+Q154R+176Y; Y147R+Q154R+T166R; Y123H+Y147R+Q154R+I76Y; V82S+Y123H+Y147R+Q154R; and I76Y+V82S+Y123H+Y147R+Q154R, relative to TadA*7.10, the TadA reference sequence, or a corresponding mutation in another TadA.

[0499] In some embodiments, the TadA*8 is truncated. In some embodiments, the truncated TadA*8 is missing 1, 2, 3, 4, 5, 6, 7, 8, 9, 10, 11, 12, 13, 14, 15, 6, 17, 18, 19, or 20 N-terminal amino acid residues relative to the full length TadA*8. In some embodiments, the truncated TadA*8 is missing 1, 2, 3, 4, 5, 6, 7, 8, 9, 10, 11, 12, 13, 14, 15, 6, 17, 18, 19, or 20 C-terminal amino acid residues relative to the full length TadA*8. In some embodiments the adenosine deaminase variant is a full-length TadA*8.

[0500] In one embodiment, a fusion protein of the invention comprises a wild-type TadA is linked to an adenosine deaminase variant described herein (e.g., TadA*8), which is linked to Cas9 nickase. In particular embodiments, the fusion proteins comprise a single TadA*8 domain (e.g., provided as a monomer). In other embodiments, the base editor comprises TadA*8 and TadA(wt), which are capable of forming heterodimers.

[0501] In particular embodiments, the fusion proteins comprise a single (e.g., provided as a monomer) TadA*8. In some embodiments, the TadA*8 is linked to a Cas9 nickase. In some embodiments, the fusion proteins of the invention comprise as a heterodimer of a wild-type TadA (TadA(wt)) linked to a TadA*8. In other embodiments, the fusion proteins of the invention comprise as a heterodimer of a TadA*7.10 linked to a TadA*8. In some embodiments, the base editor is ABE8 comprising a TadA*8 variant monomer. In some embodiments, the base editor is ABE8 comprising a heterodimer of a TadA*8 and a TadA(wt). In some embodiments, the base editor is ABE8 comprising a heterodimer of a TadA*8 and TadA*7.10. In some embodiments, the base editor is ABE8 comprising a heterodimer of a TadA*8. In some embodiments, the TadA*8 is selected from Table 6, 12, or 13. In some embodiments, the ABE8 is selected from Table 12, 13, or 15.

[0502] In some embodiments, the adenosine deaminase is a TadA*9 variant. In some embodiments, the adenosine deaminase is a TadA*9 variant selected from the variants described below and with reference to the following sequence (termed TadA*7.10):

(SEQ ID NO: 1)
MSEVEFSHEY WMRHALTLAK RARDEREVPV GAVLVLNNRV
IGEGWNRAIG LHDPTAHAEI MALRQGGLVM QNYRLIDATL
YVTFEPCVMC AGAMIHSRIG RVVFGVRNAK TGAAGSLMDV
LHYPGMNHRV EITEGILADE CAALLCYFFR MPRQVFNAQK
KAQSSTD

[0503] In some embodiments, an adenosine deaminase comprises one or more of the following alterations: R21N, R23H, E25F, N38G, L51W, P54C, M70V, Q71M, N72K, Y73S, V82T, M94V, P124W, T133K, D139L, D139M, C146R, and A158K. The one or more alternations are shown in the sequence above in underlining and bold font.

[0504] In some embodiments, an adenosine deaminase comprises one or more of the following combinations of alterations: V82S+Q154R+Y147R; V82S+Q154R+Y123H; V82S+Q154R+Y147R+Y123H; Q154R+Y147R+Y123H+I76Y+V82S; V82S+I76Y; V82S+Y147R; V82S+Y147R+Y123H; V82S+Q154R+Y123H; Q154R+Y147R+Y123H+I76Y; V82S+Y147R; V82S+Y147R+Y123H; V82S+Q154R+Y123H; V82S+Q154R+Y147R; V82S+Q154R+Y147R; Q154R+Y147R+Y123H+I76Y; Q154R+Y147R+Y123H+I76Y+V82S; I76Y_V82S_Y123H_Y147R_Q154R; Y147R+Q154R+H123H; and V82S+Q154R.

[0505] In some embodiments, an adenosine deaminase comprises one or more of the following combinations of alterations: E25F+V82S+Y123H, T133K+Y147R+Q154R; E25F+V82S+Y123H+Y147R+Q154R; L51W+V82S+Y123H+C146R+Y147R+Q154R; Y73S+V82S+Y123H+Y147R+Q154R; P54C+V82S+Y123H+Y147R+Q154R; N38G+V82T+Y123H+Y147R+Q154R; N72K+V82S+Y123H+D139L+Y147R+Q154R; E25F+V82S+Y123H+D139M+Y147R+Q154R; Q71M+V82S+Y123H+Y147R+Q154R; E25F+V82S+Y123H+T133K+Y147R+Q154R; E25F+V82S+Y123H+Y147R+Q154R; V82S+Y123H+P124W+Y147R+Q154R; L51W+V82S+Y123H+C146R+Y147R+Q154R; P54C+V82S+Y123H+Y147R+Q154R; Y73S+V82S+Y123H+Y147R+Q154R; N38G+V82T+Y123H+Y147R+Q154R; R23H+V82S+Y123H+Y147R+Q154R; R21N+V82S+Y123H+Y147R+Q154R; V82S+Y123H+Y147R+Q154R+A158K; N72K+V82S+Y123H+D139L+Y147R+Q154R; E25F+V82S+Y123H+D139M+Y147R+Q154R; and M70V+V82S+M94V+Y123H+Y147R+Q154R In some embodiments, an adenosine deaminase comprises one or more of the following combinations of alterations: Q71M+V82S+Y123H+Y147R+Q154R; E25F+I76Y+V82S+Y123H+Y147R+Q154R; I76Y+V82T+Y123H+Y147R+Q154R; N38G+I76Y+V82S+Y123H+Y147R+Q154R; R23H+I76Y+V82S+Y123H+Y147R+Q154R; P54C+I76Y+V82S+Y123H+Y147R+Q154R; R21N+I76Y+V82S+Y123H+Y147R+Q154R; I76Y+V82S+Y123H+D139M+Y147R+Q154R; Y73S+I76Y+V82S+Y123H+Y147R+Q154R; E25F+I76Y+V82S+Y123H+Y147R+Q154R; I76Y+V82T+Y123H+Y147R+Q154R; N38G+I76Y+V82S+Y123H+Y147R+Q154R; R23H+I76Y+V82S+Y123H+Y147R+Q154R; P54C+I76Y+V82S+Y123H+Y147R+Q154R; R21N+I76Y+V82S+Y123H+Y147R+Q154R; I76Y+V82S+Y123H+D139M+Y147R+Q154R; Y73S+I76Y+V82S+Y1230H+Y147R+Q154R; and V82S+Q154R; N72K_V82S+Y123H+Y147R+Q154R; Q71M_V82S+Y123H+Y147R+Q154R; V82S+Y123H+T133K+Y147R+Q154R; V82S+Y123H+T133K+Y147R+Q154R+A158K; M70V+Q71M+N72K+V82S+Y123H+Y147R+Q154R; N72K_V82S+Y123H+Y147R+Q154R; Q71M_V82S+Y123H+Y147R+Q154R; M70V+V82S+M94V+Y123H+Y147R+Q154R; V82S+Y123H+T133K+Y147R+Q154R; V82S+Y123H+T133K+Y147R+Q154R+A158K; and M70V+Q71M+N72K+V82S+Y123H+Y147R+Q154R. In some embodiments, the adenosine deaminase is expressed as a monomer. In other embodiments, the adenosine deaminase is expressed as a heterodimer. In some embodiments, the deaminase or other polypeptide sequence lacks a methionine, for example when included as a component of a fusion protein. This can alter the numbering of positions. However, the skilled person will understand that such corresponding mutations refer to the same mutation, e.g., Y73S and Y72S and D139M and D138M.

[0506] In some embodiments, the TadA*9 variant comprises the alterations described in Table 16 as described herein. In some embodiments, the TadA*9 variant is a monomer. In some embodiments, the TadA*9 variant is a heterodimer with a wild-type TadA adenosine deaminase. In some embodiments, the TadA*9 variant is a heterodimer with another TadA variant (e.g., TadA*8, TadA*9). Additional details of TadA*9 adenosine deaminases are described in International PCT Application No. PCT/2020/049975, which is incorporated herein by reference for its entirety.

[0507] Any of the mutations provided herein and any additional mutations (e.g., based on the ecTadA amino acid sequence) can be introduced into any other adenosine deaminases. Any of the mutations provided herein can be made individually or in any combination in TadA reference sequence or another adenosine deaminase (e.g., ecTadA).

[0508] Details of A to G nucleobase editing proteins are described in International PCT Application No. PCT/2017/045381 (WO2018/027078) and Gaudelli, N. M., et al., “Programmable base editing of A·T to G·C in genomic DNA without DNA cleavage” Nature, 551, 464-471 (2017), the entire contents of which are hereby incorporated by reference.

### C to T Editing

[0509] In some embodiments, a base editor disclosed herein comprises a fusion protein comprising cytidine deaminase capable of deaminating a target cytidine (C) base of a polynucleotide to produce uridine (U), which has the base pairing properties of thymine. In some embodiments, for example where the polynucleotide is double-stranded (e.g., DNA), the uridine base can then be substituted with a thymidine base (e.g., by cellular repair machinery) to give rise to a C:G to a T:A transition. In other embodiments, deamination of a C to U in a nucleic acid by a base editor cannot be accompanied by substitution of the U to a T.

[0510] The deamination of a target C in a polynucleotide to give rise to a U is a non-limiting example of a type of base editing that can be executed by a base editor described herein. In another example, a base editor comprising a cytidine deaminase domain can mediate conversion of a cytosine (C) base to a guanine (G) base. For example, a U of a polynucleotide produced by deamination of a cytidine by a cytidine deaminase domain of a base editor can be excised from the polynucleotide by a base excision repair mechanism (e.g., by a uracil DNA glycosylase (UDG) domain), producing an abasic site. The nucleobase opposite the abasic site can then be substituted (e.g., by base repair machinery) with another base, such as a C, by for example a translesion polymerase. Although it is typical for a nucleobase opposite an abasic site to be replaced with a C, other substitutions (e.g., A, G or T) can also occur.

[0511] Accordingly, in some embodiments a base editor described herein comprises a deamination domain (e.g., cytidine deaminase domain) capable of deaminating a target C to a U in a polynucleotide. Further, as described below, the base editor can comprise additional domains which facilitate conversion of the U resulting from deamination to, in some embodiments, a T or a G. For example, a base editor comprising a cytidine deaminase domain can further comprise a uracil glycosylase inhibitor (UGI) domain to mediate substitution of a U by a T, completing a C-to-T base editing event. In another example, a base editor can incorporate a translesion polymerase to improve the efficiency of C-to-G base editing, since a translesion polymerase can facilitate incorporation of a C opposite an abasic site (i.e., resulting in incorporation of a G at the abasic site, completing the C-to-G base editing event).

[0512] A base editor comprising a cytidine deaminase as a domain can deaminate a target C in any polynucleotide, including DNA, RNA and DNA-RNA hybrids. Typically, a cytidine deaminase catalyzes a C nucleobase that is positioned in the context of a single-stranded portion of a polynucleotide. In some embodiments, the entire polynucleotide comprising a target C can be single-stranded. For example, a cytidine deaminase incorporated into the base editor can deaminate a target C in a single-stranded RNA polynucleotide. In other embodiments, a base editor comprising a cytidine deaminase domain can act on a double-stranded polynucleotide, but the target C can be positioned in a portion of the polynucleotide which at the time of the deamination reaction is in a single-stranded state. For example, in embodiments where the NAGPB domain comprises a Cas9 domain, several nucleotides can be left unpaired during formation of the Cas9-gRNA-target DNA complex, resulting in formation of a Cas9 “R-loop complex”. These unpaired nucleotides can form a bubble of single-stranded DNA that can serve as a substrate for a single-strand specific nucleotide deaminase enzyme (e.g., cytidine deaminase).

[0513] In some embodiments, a cytidine deaminase of a base editor can comprise all or a portion of an apolipoprotein B mRNA editing complex (APOBEC) family deaminase. APOBEC is a family of evolutionarily conserved cytidine deaminases. Members of this family are C-to-U editing enzymes. The N-terminal domain of APOBEC like proteins is the catalytic domain, while the C-terminal domain is a pseudocatalytic domain. More specifically, the catalytic domain is a zinc dependent cytidine deaminase domain and is important for cytidine deamination. APOBEC family members include APOBEC1, APOBEC2, APOBEC3A, APOBEC3B, APOBEC3C, APOBEC3D (“APOBEC3E” now refers to this), APOBEC3F, APOBEC3G, APOBEC3H, APOBEC4, and Activation-induced (cytidine) deaminase. In some embodiments, a deaminase incorporated into a base editor comprises all or a portion of an APOBEC1 deaminase. In some embodiments, a deaminase incorporated into a base editor comprises all or a portion of APOBEC2 deaminase. In some embodiments, a deaminase incorporated into a base editor comprises all or a portion of is an APOBEC3 deaminase. In some embodiments, a deaminase incorporated into a base editor comprises all or a portion of an APOBEC3A deaminase. In some embodiments, a deaminase incorporated into a base editor comprises all or a portion of APOBEC3B deaminase. In some embodiments, a deaminase incorporated into a base editor comprises all or a portion of APOBEC3C deaminase. In some embodiments, a deaminase incorporated into a base editor comprises all or a portion of APOBEC3D deaminase. In some embodiments, a deaminase incorporated into a base editor comprises all or a portion of APOBEC3E deaminase. In some embodiments, a deaminase incorporated into a base editor comprises all or a portion of APOBEC3F deaminase. In some embodiments, a deaminase incorporated into a base editor comprises all or a portion of APOBEC3G deaminase. In some embodiments, a deaminase incorporated into a base editor comprises all or a portion of APOBEC3H deaminase. In some embodiments, a deaminase incorporated into a base editor comprises all or a portion of APOBEC4 deaminase. In some embodiments, a deaminase incorporated into a base editor comprises all or a portion of activation-induced deaminase (AID). In some embodiments a deaminase incorporated into a base editor comprises all or a portion of cytidine deaminase 1 (CDA1). It should be appreciated that a base editor can comprise a deaminase from any suitable organism (e.g., a human or a rat). In some embodiments, a deaminase domain of a base editor is from a human, chimpanzee, gorilla, monkey, cow, dog, rat, or mouse. In some embodiments, the deaminase domain of the base editor is derived from rat (e.g., rat APOBEC1). In some embodiments, the deaminase domain of the base editor is human APOBEC1. In some embodiments, the deaminase domain of the base editor is pmCDA1.

[0514] Other exemplary deaminases that can be fused to Cas9 according to aspects of this disclosure are provided below. In embodiments, the deaminases are activation-induced deaminases (AID). It should be understood that, in some embodiments, the active domain of the respective sequence can be used, e.g., the domain without a localizing signal (nuclear localization sequence, without nuclear export signal, cytoplasmic localizing signal).

[0515] Some aspects of the present disclosure are based on the recognition that modulating the deaminase domain catalytic activity of any of the fusion proteins described herein, for example by making point mutations in the deaminase domain, affect the processivity of the fusion proteins (e.g., base editors). For example, mutations that reduce, but do not eliminate, the catalytic activity of a deaminase domain within a base editing fusion protein can make it less likely that the deaminase domain will catalyze the deamination of a residue adjacent to a target residue, thereby narrowing the deamination window. The ability to narrow the deamination window can prevent unwanted deamination of residues adjacent to specific target residues, which can decrease or prevent off-target effects.

[0516] For example, in some embodiments, an APOBEC deaminase incorporated into a base editor can comprise one or more mutations selected from the group consisting of H121X, H122X, R126X, R126X, R118X, W90X, W90X, and R132X of rAPOBEC1, or one or more corresponding mutations in another APOBEC deaminase, wherein X is any amino acid. In some embodiments, an APOBEC deaminase incorporated into a base editor can comprise one or more mutations selected from the group consisting of H121R, H122R, R126A, R126E, R118A, W90A, W90Y, and R132E of rAPOBEC1, or one or more corresponding mutations in another APOBEC deaminase.

[0517] In some embodiments, an APOBEC deaminase incorporated into a base editor can comprise one or more mutations selected from the group consisting of D316X, D317X, R320X, R320X, R313X, W285X, W285X, R326X of hAPOBEC3G, or one or more corresponding mutations in another APOBEC deaminase, wherein X is any amino acid. In some embodiments, any of the fusion proteins provided herein comprise an APOBEC deaminase comprising one or more mutations selected from the group consisting of D316R, D317R, R320A, R320E, R313A, W285A, W285Y, R326E of hAPOBEC3G, or one or more corresponding mutations in another APOBEC deaminase.

[0518] In some embodiments, an APOBEC deaminase incorporated into a base editor can comprise a H121R and a H122R mutation of rAPOBEC1, or one or more corresponding mutations in another APOBEC deaminase. In some embodiments an APOBEC deaminase incorporated into a base editor can comprise an APOBEC deaminase comprising a R126A mutation of rAPOBEC1, or one or more corresponding mutations in another APOBEC deaminase. In some embodiments, an APOBEC deaminase incorporated into a base editor can comprise an APOBEC deaminase comprising a R126E mutation of rAPOBEC1, or one or more corresponding mutations in another APOBEC deaminase. In some embodiments, an APOBEC deaminase incorporated into a base editor can comprise an APOBEC deaminase comprising a R118A mutation of rAPOBEC1, or one or more corresponding mutations in another APOBEC deaminase. In some embodiments, an APOBEC deaminase incorporated into a base editor can comprise an APOBEC deaminase comprising a W90A mutation of rAPOBEC1, or one or more corresponding mutations in another APOBEC deaminase. In some embodiments, an APOBEC deaminase incorporated into a base editor can comprise an APOBEC deaminase comprising a W90Y mutation of rAPOBEC1, or one or more corresponding mutations in another APOBEC deaminase. In some embodiments, an APOBEC deaminase incorporated into a base editor can comprise an APOBEC deaminase comprising a R132E mutation of rAPOBEC1, or one or more corresponding mutations in another APOBEC deaminase. In some embodiments an APOBEC deaminase incorporated into a base editor can comprise an APOBEC deaminase comprising a W90Y and a R126E mutation of rAPOBEC1, or one or more corresponding mutations in another APOBEC deaminase. In some embodiments, an APOBEC deaminase incorporated into a base editor can comprise an APOBEC deaminase comprising a R126E and a R132E mutation of rAPOBEC1, or one or more corresponding mutations in another APOBEC deaminase. In some embodiments, an APOBEC deaminase incorporated into a base editor can comprise an APOBEC deaminase comprising a W90Y and a R132E mutation of rAPOBEC1, or one or more corresponding mutations in another APOBEC deaminase. In some embodiments, an APOBEC deaminase incorporated into a base editor can comprise an APOBEC deaminase comprising a W90Y, R126E, and R132E mutation of rAPOBEC1, or one or more corresponding mutations in another APOBEC deaminase.

[0519] In some embodiments, an APOBEC deaminase incorporated into a base editor can comprise an APOBEC deaminase comprising a D316R and a D317R mutation of hAPOBEC3G, or one or more corresponding mutations in another APOBEC deaminase. In some embodiments, any of the fusion proteins provided herein comprise an APOBEC deaminase comprising a R320A mutation of hAPOBEC3G, or one or more corresponding mutations in another APOBEC deaminase. In some embodiments, an APOBEC deaminase incorporated into a base editor can comprise an APOBEC deaminase comprising a R320E mutation of hAPOBEC3G, or one or more corresponding mutations in another APOBEC deaminase. In some embodiments, an APOBEC deaminase incorporated into a base editor can comprise an APOBEC deaminase comprising a R313A mutation of hAPOBEC3G, or one or more corresponding mutations in another APOBEC deaminase. In some embodiments, an APOBEC deaminase incorporated into a base editor can comprise an APOBEC deaminase comprising a W285A mutation of hAPOBEC3G, or one or more corresponding mutations in another APOBEC deaminase. In some embodiments, an APOBEC deaminase incorporated into a base editor can comprise an APOBEC deaminase comprising a W285Y mutation of hAPOBEC3G, or one or more corresponding mutations in another APOBEC deaminase. In some embodiments, an APOBEC deaminase incorporated into a base editor can comprise an APOBEC deaminase comprising a R326E mutation of hAPOBEC3G, or one or more corresponding mutations in another APOBEC deaminase. In some embodiments, an APOBEC deaminase incorporated into a base editor can comprise an APOBEC deaminase comprising a W285Y and a R320E mutation of hAPOBEC3G, or one or more corresponding mutations in another APOBEC deaminase. In some embodiments, an APOBEC deaminase incorporated into a base editor can comprise an APOBEC deaminase comprising a R320E and a R326E mutation of hAPOBEC3G, or one or more corresponding mutations in another APOBEC deaminase. In some embodiments, an APOBEC deaminase incorporated into a base editor can comprise an APOBEC deaminase comprising a W285Y and a R326E mutation of hAPOBEC3G, or one or more corresponding mutations in another APOBEC deaminase. In some embodiments, an APOBEC deaminase incorporated into a base editor can comprise an APOBEC deaminase comprising a W285Y, R320E, and R326E mutation of hAPOBEC3G, or one or more corresponding mutations in another APOBEC deaminase.

[0520] A number of modified cytidine deaminases are commercially available, including, but not limited to, SaBE3, SaKKH-BE3, VQR-BE3, EQR-BE3, VRER-BE3, YE1-BE3, EE-BE3, YE2-BE3, and YEE-BE3, which are available from Addgene (plasmids 85169, 85170, 85171, 85172, 85173, 85174, 85175, 85176, 85177). In some embodiments, a deaminase incorporated into a base editor comprises all or a portion of an APOBEC1 deaminase.

[0521] In some embodiments, the fusion proteins of the invention comprise one or more cytidine deaminase domains. In some embodiments, the cytidine deaminases provided herein are capable of deaminating cytosine or 5-methylcytosine to uracil or thymine. In some embodiments, the cytidine deaminases provided herein are capable of deaminating cytosine in DNA. The cytidine deaminase may be derived from any suitable organism. In some embodiments, the cytidine deaminase is a naturally-occurring cytidine deaminase that includes one or more mutations corresponding to any of the mutations provided herein. One of skill in the art will be able to identify the corresponding residue in any homologous protein, e.g., by sequence alignment and determination of homologous residues. Accordingly, one of skill in the art would be able to generate mutations in any naturally-occurring cytidine deaminase that corresponds to any of the mutations described herein. In some embodiments, the cytidine deaminase is from a prokaryote. In some embodiments, the cytidine deaminase is from a bacterium. In some embodiments, the cytidine deaminase is from a mammal (e.g., human).

[0522] In some embodiments, the cytidine deaminase comprises an amino acid sequence that is at least 60%, at least 65%, at least 70%, at least 75%, at least 80%, at least 85%, at least 90%, at least 95%, at least 96%, at least 97%, at least 98%, at least 99%, or at least 99.5% identical to any one of the cytidine deaminase amino acid sequences set forth herein. It should be appreciated that cytidine deaminases provided herein may include one or more mutations (e.g., any of the mutations provided herein). Some embodiments provide a polynucleotide molecule encoding the cytidine deaminase nucleobase editor polypeptide of any previous aspect or as delineated herein. In some embodiments, the polynucleotide is codon optimized.

[0523] The disclosure provides any deaminase domains with a certain percent identity plus any of the mutations or combinations thereof described herein. In some embodiments, the cytidine deaminase comprises an amino acid sequence that has 1, 2, 3, 4, 5, 6, 7, 8, 9, 10, 11, 12, 13, 14, 15, 16, 17, 18, 19, 20, 21, 22, 21, 24, 25, 26, 27, 28, 29, 30, 31, 32, 33, 34, 35, 36, 37, 38, 39, 40, 41, 42, 43, 44, 45, 46, 47, 48, 49, 50, or more mutations compared to a reference sequence, or any of the cytidine deaminases provided herein. In some embodiments, the cytidine deaminase comprises an amino acid sequence that has at least 5, at least 10, at least 15, at least 20, at least 25, at least 30, at least 35, at least 40, at least 45, at least 50, at least 60, at least 70, at least 80, at least 90, at least 100, at least 110, at least 120, at least 130, at least 140, at least 150, at least 160, or at least 170 identical contiguous amino acid residues as compared to any one of the amino acid sequences known in the art or described herein.

[0524] A fusion protein of the invention second protein comprises two or more nucleic acid editing domains.

[0525] Details of C to T nucleobase editing proteins are described in International PCT Application No. PCT/US2016/058344 (WO2017/070632) and Komor, A. C., et al., “Programmable editing of a target base in genomic DNA without double-stranded DNA cleavage” Nature 533, 420-424 (2016), the entire contents of which are hereby incorporated by reference.

### Guide Polynucleotides

[0526] A polynucleotide programmable nucleotide binding domain, when in conjunction with a bound guide polynucleotide (e.g., gRNA), can specifically bind to a target polynucleotide sequence (i.e., via complementary base pairing between bases of the bound guide nucleic acid and bases of the target polynucleotide sequence) and thereby localize the base editor to the target nucleic acid sequence desired to be edited. In some embodiments, the target polynucleotide sequence comprises single-stranded DNA or double-stranded DNA. In some embodiments, the target polynucleotide sequence comprises RNA. In some embodiments, the target polynucleotide sequence comprises a DNA-RNA hybrid.

[0527] CRISPR is an adaptive immune system that provides protection against mobile genetic elements (viruses, transposable elements and conjugative plasmids). CRISPR clusters contain spacers, sequences complementary to antecedent mobile elements, and target invading nucleic acids. CRISPR clusters are transcribed and processed into CRISPR RNA (crRNA). In type II CRISPR systems, correct processing of pre-crRNA requires a trans-encoded small RNA (tracrRNA), endogenous ribonuclease 3 (mc) and a Cas9 protein. The tracrRNA serves as a guide for ribonuclease 3-aided processing of pre-crRNA. Subsequently, Cas9/crRNA/tracrRNA endonucleolytically cleaves linear or circular dsDNA target complementary to the spacer. The target strand not complementary to crRNA is first cut endonucleolytically, and then trimmed 3′-5′ exonucleolytically. In nature, DNA-binding and cleavage typically requires protein and both RNAs. However, single guide RNAs (“sgRNA”, or simply “gNRA”) can be engineered so as to incorporate aspects of both the crRNA and tracrRNA into a single RNA species. See. e.g., Jinek M., Chylinski K., Fonfara I., Hauer M., Doudna J. A., Charpentier E. Science 337:816-821(2012), the entire contents of which is hereby incorporated by reference. Cas9 recognizes a short motif in the CRISPR repeat sequences (the PAM or protospacer adjacent motif) to help distinguish self versus non-self. See e.g., “Complete genome sequence of an M1 strain of Streptococcus pyogenes.” Ferretti, J. J. et al., Natl. Acad. Sci. U.S.A. 98:4658-4663(2001); “CRISPR RNA maturation by trans-encoded small RNA and host factor RNase III.” Deltcheva E. et al., Nature 471:602-607(2011); and “Programmable dual-RNA-guided DNA endonuclease in adaptive bacterial immunity.” Jinek M. et al, Science 337:816-821(2012), the entire contents of each of which are incorporated herein by reference).

[0528] The PAM sequence can be any PAM sequence known in the art. Suitable PAM sequences include, but are not limited to, NGG, NGA, NGC, NGN, NGT, NGCG, NGAG, NGAN, NGNG, NGCN, NGCG, NGTN, NNGRRT, NNNRRT, NNGRR (N), TTTV, TYCV, TYCV, TATV, NNNNGATT, NNAGAAW, or NAAAAC. Y is a pyrimidine; N is any nucleotide base; W is A or T.

[0529] In an embodiment, a guide polynucleotide described herein can be RNA or DNA. In one embodiment, the guide polynucleotide is a gRNA. An RNA/Cas complex can assist in “guiding” a Cas protein to a target DNA. Cas9/crRNA/tracrRNA endonucleolytically cleaves linear or circular dsDNA target complementary to the spacer. The target strand not complementary to crRNA is first cut endonucleolytically, then trimmed 3′-5′ exonucleolytically. In nature, DNA-binding and cleavage typically requires protein and both RNAs. However, single guide RNAs (“sgRNA”, or simply “gNRA”) can be engineered so as to incorporate aspects of both the crRNA and tracrRNA into a single RNA species. See. e.g., Jinek M. et al., Science 337:816-821(2012), the entire contents of which is hereby incorporated by reference.

[0530] In some embodiments, the guide polynucleotide is at least one single guide RNA (“sgRNA” or “gNRA”). In some embodiments, a guide polynucleotide comprises two or more individual polynucleotides, which can interact with one another via for example complementary base pairing (e.g., a dual guide polynucleotide, dual gRNA). For example, a guide polynucleotide can comprise a CRISPR RNA (crRNA) and a trans-activating CRISPR RNA (tracrRNA) or can comprise one or more trans-activating CRISPR RNA (tracrRNA).

[0531] In some embodiments, the guide polynucleotide is at least one tracrRNA. In some embodiments, the guide polynucleotide does not require PAM sequence to guide the polynucleotide-programmable DNA-binding domain (e.g., Cas9 or Cpf1) to the target nucleotide sequence.

[0532] A guide polynucleotide may include natural or non-natural (or unnatural) nucleotides (e.g., peptide nucleic acid or nucleotide analogs). In some cases, the targeting region of a guide nucleic acid sequence can be at least 15, 16, 17, 18, 19, 20, 21, 22, 23, 24, 25, 26, 27, 28, 29, or 30 nucleotides in length. A targeting region of a guide nucleic acid can be between 10-30 nucleotides in length, or between 15-25 nucleotides in length, or between 15-20 nucleotides in length.

[0533] In some embodiments, the base editor provided herein utilizes one or more guide polynucleotide (e.g., multiple gRNA). In some embodiments, a single guide polynucleotide is utilized for different base editors described herein. For example, a single guide polynucleotide can be utilized for a cytidine base editor and an adenosine base editor.

[0534] In some embodiments, the methods described herein can utilize an engineered Cas protein. A guide RNA (gRNA) is a short synthetic RNA composed of a scaffold sequence necessary for Cas-binding and a user-defined ˜20 nucleotide spacer that defines the genomic target to be modified. Exemplary gRNA scaffold sequences are provided in the sequence listing as SEQ ID NOs: 317-327. Thus, a skilled artisan can change the genomic target of the Cas protein specificity is partially determined by how specific the gRNA targeting sequence is for the genomic target compared to the rest of the genome.

[0535] In other embodiments, a guide polynucleotide can comprise both the polynucleotide targeting portion of the nucleic acid and the scaffold portion of the nucleic acid in a single molecule (i.e., a single-molecule guide nucleic acid). For example, a single-molecule guide polynucleotide can be a single guide RNA (sgRNA or gRNA). Herein the term guide polynucleotide sequence contemplates any single, dual or multi-molecule nucleic acid capable of interacting with and directing a base editor to a target polynucleotide sequence.

[0536] Typically, a guide polynucleotide (e.g., crRNA/trRNA complex or a gRNA) comprises a “polynucleotide-targeting segment” that includes a sequence capable of recognizing and binding to a target polynucleotide sequence, and a “protein-binding segment” that stabilizes the guide polynucleotide within a polynucleotide programmable nucleotide binding domain component of a base editor. In some embodiments, the polynucleotide targeting segment of the guide polynucleotide recognizes and binds to a DNA polynucleotide, thereby facilitating the editing of a base in DNA. In other cases, the polynucleotide targeting segment of the guide polynucleotide recognizes and binds to an RNA polynucleotide, thereby facilitating the editing of a base in RNA. Herein a “segment” refers to a section or region of a molecule, e.g., a contiguous stretch of nucleotides in the guide polynucleotide. A segment can also refer to a region/section of a complex such that a segment can comprise regions of more than one molecule. For example, where a guide polynucleotide comprises multiple nucleic acid molecules, the protein-binding segment of can include all or a portion of multiple separate molecules that are for instance hybridized along a region of complementarity. In some embodiments, a protein-binding segment of a DNA-targeting RNA that comprises two separate molecules can comprise (i) base pairs 40-75 of a first RNA molecule that is 100 base pairs in length; and (ii) base pairs 10-25 of a second RNA molecule that is 50 base pairs in length. The definition of “segment,” unless otherwise specifically defined in a particular context, is not limited to a specific number of total base pairs, is not limited to any particular number of base pairs from a given RNA molecule, is not limited to a particular number of separate molecules within a complex, and can include regions of RNA molecules that are of any total length and can include regions with complementarity to other molecules.

[0537] The guide polynucleotides can be synthesized chemically, synthesized enzymatically, or a combination thereof. For example, the gRNA can be synthesized using standard phosphoramidite-based solid-phase synthesis methods. Alternatively, the gRNA can be synthesized in vitro by operably linking DNA encoding the gRNA to a promoter control sequence that is recognized by a phage RNA polymerase. Examples of suitable phage promoter sequences include T7, T3, SP6 promoter sequences, or variations thereof. In embodiments in which the gRNA comprises two separate molecules (e.g., crRNA and tracrRNA), the crRNA can be chemically synthesized and the tracrRNA can be enzymatically synthesized.

[0538] A gRNA molecule can be transcribed in vitro.

[0539] A guide polynucleotide may be expressed, for example, by a DNA that encodes the gRNA, e.g., a DNA vector comprising a sequence encoding the gRNA. The gRNA may be encoded alone or together with an encoded base editor. Such DNA sequences may be introduced into an expression system, e.g., a cell, together or separately. For example, DNA sequences encoding a polynucleotide programmable nucleotide binding domain and a gRNA may be introduced into a cell, each DNA sequence can be part of a separate molecule (e.g., one vector containing the polynucleotide programmable nucleotide binding domain coding sequence and a second vector containing the gRNA coding sequence) or both can be part of a same molecule (e.g., one vector containing coding (and regulatory) sequence for both the polynucleotide programmable nucleotide binding domain and the gRNA). An RNA can be transcribed from a synthetic DNA molecule, e.g., a gBlocks® gene fragment.

[0540] A gRNA or a guide polynucleotide can comprise three regions: a first region at the 5′ end that can be complementary to a target site in a chromosomal sequence, a second internal region that can form a stem loop structure, and a third 3′ region that can be single-stranded. A first region of each gRNA can also be different such that each gRNA guides a fusion protein to a specific target site. Further, second and third regions of each gRNA can be identical in all gRNAs.

[0541] A first region of a gRNA or a guide polynucleotide can be complementary to sequence at a target site in a chromosomal sequence such that the first region of the gRNA can base pair with the target site. In some cases, a first region of a gRNA can comprise from or from about 10 nucleotides to 25 nucleotides (i.e., from 10 nucleotides to nucleotides; or from about 10 nucleotides to about 25 nucleotides; or from 10 nucleotides to about 25 nucleotides; or from about 10 nucleotides to 25 nucleotides) or more. For example, a region of base pairing between a first region of a gRNA and a target site in a chromosomal sequence can be or can be about 10, 11, 12, 13, 14, 15, 16, 17, 18, 19, 20, 22, 23, 24, 25, or more nucleotides in length. Sometimes, a first region of a gRNA can be or can be about 19, 20, or 21 nucleotides in length.

[0542] A gRNA or a guide polynucleotide can also comprise a second region that forms a secondary structure. For example, a secondary structure formed by a gRNA can comprise a stem (or hairpin) and a loop. A length of a loop and a stem can vary. For example, a loop can range from or from about 3 to 10 nucleotides in length, and a stem can range from or from about 6 to 20 base pairs in length. A stem can comprise one or more bulges of 1 to 10 or about 10 nucleotides. The overall length of a second region can range from or from about 16 to 60 nucleotides in length. For example, a loop can be or can be about 4 nucleotides in length and a stem can be or can be about 12 base pairs.

[0543] A gRNA or a guide polynucleotide can also comprise a third region at the 3′ end that can be essentially single-stranded. For example, a third region is sometimes not complementarity to any chromosomal sequence in a cell of interest and is sometimes not complementarity to the rest of a gRNA. Further, the length of a third region can vary. A third region can be more than or more than about 4 nucleotides in length. For example, the length of a third region can range from or from about 5 to 60 nucleotides in length.

[0544] A gRNA or a guide polynucleotide can target any exon or intron of a gene target. In some cases, a guide can target exon 1 or 2 of a gene, in other cases; a guide can target exon 3 or 4 of a gene. In some embodiments, a composition comprises multiple gRNAs that all target the same exon or multiple gRNAs that target different exons. An exon and/or an intron of a gene can be targeted.

[0545] A gRNA or a guide polynucleotide can target a nucleic acid sequence of about 20 nucleotides or less than about 20 nucleotides (e.g., at least about 5, 10, 15, 16, 17, 18, 19, 20, 21, 22, 23, 24, 25, 30 nucleotides), or anywhere between about 1-100 nucleotides (e.g., 5, 10, 15, 16, 17, 18, 19, 20, 21, 22, 23, 24, 25, 30, 40, 50, 60, 70, 80, 90, 100). A target nucleic acid sequence can be or can be about 20 bases immediately 5′ of the first nucleotide of the PAM. A gRNA can target a nucleic acid sequence. A target nucleic acid can be at least or at least about 1-10, 1-20, 1-30, 1-40, 1-50, 1-60, 1-70, 1-80, 1-90, or 1-100 nucleotides.

[0546] Methods for selecting, designing, and validating guide polynucleotides, e.g., gRNAs and targeting sequences are described herein and known to those skilled in the art. For example, to minimize the impact of potential substrate promiscuity of a deaminase domain in the nucleobase editor system (e.g., an AID domain), the number of residues that could unintentionally be targeted for deamination (e.g., off-target C residues that could potentially reside on single strand DNA within the target nucleic acid locus) may be minimized. In addition, software tools can be used to optimize the gRNAs corresponding to a target nucleic acid sequence, e.g., to minimize total off-target activity across the genome. For example, for each possible targeting domain choice using S. pyogenes Cas9, all off-target sequences (preceding selected PAMs, e.g., NAG or NGG) may be identified across the genome that contain up to certain number (e.g., 1, 2, 3, 4, 5, 6, 7, 8, 9, or 10) of mismatched base-pairs. First regions of gRNAs complementary to a target site can be identified, and all first regions (e.g., crRNAs) can be ranked according to its total predicted off-target score; the top-ranked targeting domains represent those that are likely to have the greatest on-target and the least off-target activity. Candidate targeting gRNAs can be functionally evaluated by using methods known in the art and/or as set forth herein.

[0547] As a non-limiting example, target DNA hybridizing sequences in crRNAs of a gRNA for use with Cas9s may be identified using a DNA sequence searching algorithm. gRNA design is carried out using custom gRNA design software based on the public tool cas-OFFinder as described in Bae S., Park J., & Kim J.-S. Cas-OFFinder: A fast and versatile algorithm that searches for potential off-target sites of Cas9 RNA-guided endonucleases. Bioinformatics 30, 1473-1475 (2014). Ibis software scores guides after calculating their genome-wide off-target propensity. Typically matches ranging from perfect matches to 7 mismatches are considered for guides ranging in length from 17 to 24. Once the off-target sites are computationally-determined, an aggregate score is calculated for each guide and summarized in a tabular output using a web-interface. In addition to identifying potential target sites adjacent to PAM sequences, the software also identifies all PAM adjacent sequences that differ by 1, 2, 3 or more than 3 nucleotides from the selected target sites. Genomic DNA sequences for a target nucleic acid sequence, e.g., a target gene may be obtained and repeat elements may be screened using publicly available tools, for example, the RepeatMasker program. RepeatMasker searches input DNA sequences for repeated elements and regions of low complexity. The output is a detailed annotation of the repeats present in a given query sequence.

[0548] Following identification, first regions of gRNAs, e.g., crRNAs, are ranked into tiers based on their distance to the target site, their orthogonality and presence of 5′ nucleotides for close matches with relevant PAM sequences (for example, a 5′ G based on identification of close matches in the human genome containing a relevant PAM e.g., NGG PAM for S. pyogenes, NNGRRT or NNGRRV PAM for S. aureus). As used herein, orthogonality refers to the number of sequences in the human genome that contain a minimum number of mismatches to the target sequence. A “high level of orthogonality” or “good orthogonality” may, for example, refer to 20-mer targeting domains that have no identical sequences in the human genome besides the intended target, nor any sequences that contain one or two mismatches in the target sequence. Targeting domains with good orthogonality may be selected to minimize off-target DNA cleavage.

[0549] A gRNA can then be introduced into a cell or embryo as an RNA molecule or a non-RNA nucleic acid molecule, e.g., DNA molecule. In one embodiment, a DNA encoding a gRNA is operably linked to promoter control sequence for expression of the gRNA in a cell or embryo of interest. A RNA coding sequence can be operably linked to a promoter sequence that is recognized by RNA polymerase III (Pol III). Plasmid vectors that can be used to express gRNA include, but are not limited to, px330 vectors and px333 vectors. In some cases, a plasmid vector (e.g., px333 vector) can comprise at least two gRNA-encoding DNA sequences. Further, a vector can comprise additional expression control sequences (e.g., enhancer sequences, Kozak sequences, polyadenylation sequences, transcriptional termination sequences, etc.), selectable marker sequences (e.g., GFP or antibiotic resistance genes such as puromycin), origins of replication, and the like. A DNA molecule encoding a gRNA can also be linear. A DNA molecule encoding a gRNA or a guide polynucleotide can also be circular.

[0550] In some embodiments, a reporter system is used for detecting base-editing activity and testing candidate guide polynucleotides. In some embodiments, a reporter system comprises a reporter gene based assay where base editing activity leads to expression of the reporter gene. For example, a reporter system may include a reporter gene comprising a deactivated start codon, e.g., a mutation on the template strand from 3′-TAC-5′ to 3′-CAC-5′. Upon successful deamination of the target C, the corresponding mRNA will be transcribed as 5′-AUG-3′ instead of 5′-GUG-3′, enabling the translation of the reporter gene. Suitable reporter genes will be apparent to those of skill in the art. Non-limiting examples of reporter genes include gene encoding green fluorescence protein (GFP), red fluorescence protein (RFP), luciferase, secreted alkaline phosphatase (SEAP), or any other gene whose expression are detectable and apparent to those skilled in the art. The reporter system can be used to test many different gRNAs, e.g., in order to determine which residue(s) with respect to the target DNA sequence the respective deaminase will target. sgRNAs that target non-template strand can also be tested in order to assess off-target effects of a specific base editing protein, e.g., a Cas9 deaminase fusion protein. In some embodiments, such gRNAs can be designed such that the mutated start codon will not be base-paired with the gRNA. The guide polynucleotides can comprise standard ribonucleotides, modified ribonucleotides (e.g., pseudouridine), ribonucleotide isomers, and/or ribonucleotide analogs. In some embodiments, the guide polynucleotide can comprise at least one detectable label. The detectable label can be a fluorophore (e.g., FAM, TMR, Cy3, Cy5, Texas Red, Oregon Green, Alexa Fluors, Halo tags, or suitable fluorescent dye), a detection tag (e.g., biotin, digoxigenin, and the like), quantum dots, or gold particles.

[0551] In some embodiments, a base editor system may comprise multiple guide polynucleotides, e.g., gRNAs. For example, the gRNAs may target to one or more target loci (e.g., at least 1 gRNA, at least 2 gRNA, at least 5 gRNA, at least 10 gRNA, at least 20 gRNA, at least 30 g RNA, at least 50 gRNA) comprised in a base editor system. The multiple gRNA sequences can be tandemly arranged and are preferably separated by a direct repeat.

[0552] A guide polynucleotide can comprise one or more modifications to provide a nucleic acid with a new or enhanced feature. A guide polynucleotide can comprise a nucleic acid affinity tag. A guide polynucleotide can comprise synthetic nucleotide, synthetic nucleotide analog, nucleotide derivatives, and/or modified nucleotides.

[0553] In some cases, a gRNA or a guide polynucleotide can comprise modifications. A modification can be made at any location of a gRNA or a guide polynucleotide. More than one modification can be made to a single gRNA or a guide polynucleotide. A gRNA or a guide polynucleotide can undergo quality control after a modification. In some cases, quality control can include PAGE, HPLC, MS, or any combination thereof.

[0554] A modification of a gRNA or a guide polynucleotide can be a substitution, insertion, deletion, chemical modification, physical modification, stabilization, purification, or any combination thereof.

[0555] A gRNA or a guide polynucleotide can also be modified by 5′ adenylate, 5′ guanosine-triphosphate cap, 5′ N7-Methylguanosine-triphosphate cap, 5′ triphosphate cap, 3′ phosphate, 3′ thiophosphate, 5′ phosphate, 5′ thiophosphate, Cis-Syn thymidine dimer, trimers, C12 spacer, C3 spacer, C6 spacer, dSpacer, PC spacer, rSpacer, Spacer 18, Spacer 9, 3′-3′ modifications, 5′-5′ modifications, abasic, acridine, azobenzene, biotin, biotin BB, biotin TEG, cholesteryl TEG, desthiobiotin TEG, DNP TEG, DNP-X, DOTA, dT-Biotin, dual biotin, PC biotin, psoralen C2, psoralen C6, TINA, 3′ DABCYL, black hole quencher 1, black hole quencer 2, DABCYL SE, dT-DABCYL, IRDye QC-1, QSY-21, QSY-35, QSY-7, QSY-9, carboxyl linker, thiol linkers, 2′-deoxyribonucleoside analog purine, 2′-deoxyribonucleoside analog pyrimidine, ribonucleoside analog, 2′-O-methyl ribonucleoside analog, sugar modified analogs, wobble/universal bases, fluorescent dye label, 2′-fluoro RNA, 2′-O-methyl RNA, methylphosphonate, phosphodiester DNA, phosphodiester RNA, phosphothioate DNA, phosphorothioate RNA, UNA, pseudouridine-5′-triphosphate, 5′-methylcytidine-5′-triphosphate, or any combination thereof.

[0556] In some cases, a modification is permanent. In other cases, a modification is transient. In some cases, multiple modifications are made to a gRNA or a guide polynucleotide. A gRNA or a guide polynucleotide modification can alter physiochemical properties of a nucleotide, such as their conformation, polarity, hydrophobicity, chemical reactivity, base-pairing interactions, or any combination thereof.

[0557] A guide polynucleotide can be transferred into a cell by transfecting the cell with an isolated gRNA or a plasmid DNA comprising a sequence coding for the guide RNA and a promoter. A gRNA or a guide polynucleotide can also be transferred into a cell in other way, such as using virus-mediated gene delivery. A gRNA or a guide polynucleotide can be isolated. For example, a gRNA can be transfected in the form of an isolated RNA into a cell or organism. A gRNA can be prepared by in vitro transcription using any in vitro transcription system known in the art. A gRNA can be transferred to a cell in the form of isolated RNA rather than in the form of plasmid comprising encoding sequence for a gRNA.

[0558] A modification can also be a phosphorothioate substitute. In some cases, a natural phosphodiester bond can be susceptible to rapid degradation by cellular nucleases and; a modification of internucleotide linkage using phosphorothioate (PS) bond substitutes can be more stable towards hydrolysis by cellular degradation. A modification can increase stability in a gRNA or a guide polynucleotide. A modification can also enhance biological activity. In some cases, a phosphorothioate enhanced RNA gRNA can inhibit RNase A, RNase T1, calf serum nucleases, or any combinations thereof. These properties can allow the use of PS-RNA gRNAs to be used in applications where exposure to nucleases is of high probability in vivo or in vitro. For example, phosphorothioate (PS) bonds can be introduced between the last 3-5 nucleotides at the 5′- or 3′-end of a gRNA which can inhibit exonuclease degradation. In some cases, phosphorothioate bonds can be added throughout an entire gRNA to reduce attack by endonucleases.

[0559] In some embodiments, the guide RNA is designed to disrupt a splice site (i.e., a splice acceptor (SA) or a splice donor (SD). In some embodiments, the guide RNA is designed such that the base editing results in a premature STOP codon.

### Protospacer Adjacent Motif

[0560] The term “protospacer adjacent motif (PAM)” or PAM-like motif refers to a 2-6 base pair DNA sequence immediately following the DNA sequence targeted by the Cas9 nuclease in the CRISPR bacterial adaptive immune system. In some embodiments, the PAM can be a 5′ PAM (i.e., located upstream of the 5′ end of the protospacer). In other embodiments, the PAM can be a 3′ PAM (i.e., located downstream of the 5′ end of the protospacer). The PAM sequence is essential for target binding, but the exact sequence depends on a type of Cas protein. The PAM sequence can be any PAM sequence known in the art. Suitable PAM sequences include, but are not limited to, NGG, NGA, NGC, NGN, NGT, NGTT, NGCG, NGAG, NGAN, NGNG, NGCN, NGCG, NGTN, NNGRRT, NNNRRT, NNGRR (N), TTTV, TYCV, TYCV, TATV, NNNNGATT, NNAGAAW, or NAAAAC. Y is a pyrimidine; N is any nucleotide base; W is A or T.

[0561] A base editor provided herein can comprise a CRISPR protein-derived domain that is capable of binding a nucleotide sequence that contains a canonical or non-canonical protospacer adjacent motif (PAM) sequence. A PAM site is a nucleotide sequence in proximity to a target polynucleotide sequence. Some aspects of the disclosure provide for base editors comprising all or a portion of CRISPR proteins that have different PAM specificities.

[0562] For example, typically Cas9 proteins, such as Cas9 from S. pyogenes (spCas9), require a canonical NGG PAM sequence to bind a particular nucleic acid region, where the “N” in “NGG” is adenine (A), thymine (T), guanine (G), or cytosine (C), and the G is guanine. A PAM can be CRISPR protein-specific and can be different between different base editors comprising different CRISPR protein-derived domains. A PAM can be 5′ or 3′ of a target sequence. A PAM can be upstream or downstream of a target sequence. A PAM can be 1, 2, 3, 4, 5, 6, 7, 8, 9, 10 or more nucleotides in length. Often, a PAM is between 2-6 nucleotides in length.

[0563] In some embodiments, the PAM is an “NRN” PAM where the “N” in “NRN” is adenine (A), thymine (T), guanine (G), or cytosine (C), and the R is adenine (A) or guanine (G); or the PAM is an “NYN” PAM, wherein the “N” in NYN is adenine (A), thymine (T), guanine (G), or cytosine (C), and the Y is cytidine (C) or thymine (T), for example, as described in R. T. Walton et al., 2020, Science, 10.1126/science.aba8853 (2020), the entire contents of which are incorporated herein by reference.

[0564] Several PAM variants are described in Table 7 below.

TABLE 7
Cas9 proteins and corresponding PAM sequences

| Variant | PAM |
|---|---|
| spCas9 | NGG |
| spCas9-VRQR | NGA |
| spCas9-VRER | NGCG |
| xCas9 (sp) | NGN |
| saCas9 | NNGRRT |
| saCas9-KKH | NNNRRT |
| spCas9-MQKSER | NGCG |
| spCas9-MQKSER | NGCN |
| spCas9-LRKIQK | NGTN |
| spCas9-LRVSQK | NGTN |
| spCas9-LRVSQL | NGTN |
| spCas9-MQKFRAER | NGC |
| Cpf1 | 5′ (TTTV) |
| SpyMac | 5′-NAA-3′ |

[0565] In some embodiments, the PAM is NGC. In some embodiments, the NGC PAM is recognized by a Cas9 variant. In some embodiments, the NGC PAM variant includes one or more amino acid substitutions selected from D1135M, S1136Q, G1218K, E1219F, A1322R, D1332A, R1335E, and T1337R (collectively termed “MQKFRAER”).

[0566] In some embodiments, the PAM is NGT. In some embodiments, the NGT PAM is recognized by a Cas9 variant. In some embodiments, the NGT PAM variant is generated through targeted mutations at one or more residues 1335, 1337, 1135, 1136, 1218, and/or 1219. In some embodiments, the NGT PAM variant is created through targeted mutations at one or more residues 1219, 1335, 1337, 1218. In some embodiments, the NGT PAM variant is created through targeted mutations at one or more residues 1135, 1136, 1218, 1219, and 1335. In some embodiments, the NGT PAM variant is selected from the set of targeted mutations provided in Tables 8A and 8B below.

TABLE 8A
NGT PAM Variant Mutations at residues 1219, 1335, 1337, 1218

| Variant | E1219V | R1335Q | T1337 | G1218 |
|---|---|---|---|---|
| 1 | F | V | T | |
| 2 | F | V | R | |
| 3 | F | V | Q | |
| 4 | F | V | L | |
| 5 | F | V | T | R |
| 6 | F | V | R | R |
| 7 | F | V | Q | R |
| 8 | F | V | L | R |
| 9 | L | L | T | |
| 10 | L | L | R | |
| 11 | L | L | 0 | |
| 12 | L | L | L | |
| 13 | F | I | T | |
| 14 | F | I | R | |
| 15 | F | I | Q | |
| 16 | F | I | L | |
| 17 | F | G | C | |
| 18 | H | L | N | |
| 19 | F | G | C | A |
| 20 | H | L | N | V |
| 21 | L | A | W | |
| 22 | L | A | F | |
| 23 | L | A | Y | |
| 24 | I | A | M | |
| 25 | I | A | F | |
| 26 | I | A | Y | |

TABLE 8B
NGT PAM Variant Mutations at residues
1135, 1136, 1218, 1219, and 1335

| Variant | D1135L | S1136R | G1218S | E1219V | R1335Q |
|---|---|---|---|---|---|
| 27 | G | | | | |
| 28 | V | | | | |
| 29 | I | | | | |
| 30 | | A | | | |
| 31 | | W | | | |
| 32 | | H | | | |
| 33 | | K | | | |
| 34 | | | K | | |
| 35 | | | R | | |
| 36 | | | Q | | |
| 37 | | | T | | |
| 38 | | | N | | |
| 39 | | | | I | |
| 40 | | | | A | |
| 41 | | | | N | |
| 42 | | | | Q | |
| 43 | | | | G | |
| 44 | | | | L | |
| 45 | | | | S | |
| 46 | | | | T | |
| 47 | | | | | L |
| 48 | | | | | I |
| 49 | | | | | V |
| 50 | | | | | N |
| 51 | | | | | S |
| 52 | | | | | T |
| 53 | | | | | F |
| 54 | | | | | Y |
| 55 | N1286Q | I1331F | | | |

[0567] In some embodiments, the NGT PAM variant is selected from variant 5, 7, 28, 31, or 36 in Table 8A and Table 8B. In some embodiments, the variants have improved NGT PAM recognition.

[0568] In some embodiments, the NGT PAM variants have mutations at residues 1219, 1335, 1337, and/or 1218. In some embodiments, the NGT PAM variant is selected with mutations for improved recognition from the variants provided in Table 9 below.

TABLE 9
NGT PAM Variant Mutations at residues
1219, 1335, 1337, and 1218

| Variant | E1219V | R1335Q | T1337 | G1218 |
|---|---|---|---|---|
| 1 | F | V | T | |
| 2 | F | V | R | |
| 3 | F | V | Q | |
| 4 | F | V | L | |
| 5 | F | V | T | R |
| 6 | F | V | R | R |
| 7 | F | V | Q | R |
| 8 | F | V | L | R |

[0569] In some embodiments, the NGT PAM is selected from the variants provided in Table 10 below.

TABLE 10
NGT PAM variants

| | NGTN | | | | | | | |
|---|---|---|---|---|---|---|---|---|
| | variant | D1135 | S1136 | G1218 | E1219 | A1322R | R1335 | T1337 |
| Variant 1 | LRKIQK | L | R | K | I | — | Q | K |
| Variant 2 | LRSVQK | L | R | S | V | — | Q | K |
| Variant 3 | LRSVQL | L | R | S | V | — | Q | L |
| Variant 4 | LRKIRQK | L | R | K | I | R | Q | K |
| Variant 5 | LRSVRQK | L | R | S | V | R | Q | K |
| Variant 6 | LRSVRQL | L | R | S | V | R | Q | L |

[0570] In some embodiments the NGTN variant is variant 1. In some embodiments, the NGTN variant is variant 2. In some embodiments, the NGTN variant is variant 3. In some embodiments, the NGTN variant is variant 4. In some embodiments, the NGTN variant is variant 5. In some embodiments, the NGTN variant is variant 6.

[0571] In some embodiments, the Cas9 domain is a Cas9 domain from Streptococcus pyogenes (SpCas9). In some embodiments, the SpCas9 domain is a nuclease active SpCas9, a nuclease inactive SpCas9 (SpCas9d), or a SpCas9 nickase (SpCas9n). In some embodiments, the SpCas9 comprises a D9X mutation, or a corresponding mutation in any of the amino acid sequences provided herein, wherein X is any amino acid except for D. In some embodiments, the SpCas9 comprises a D9A mutation, or a corresponding mutation in any of the amino acid sequences provided herein. In some embodiments, the SpCas9 domain, the SpCas9d domain, or the SpCas9n domain can bind to a nucleic acid sequence having a non-canonical PAM. In some embodiments, the SpCas9 domain, the SpCas9d domain, or the SpCas9n domain can bind to a nucleic acid sequence having an NGG, a NGA, or a NGCG PAM sequence.

[0572] In some embodiments, the SpCas9 domain comprises one or more of a D1135X, a R1335X, and a T1337X mutation, or a corresponding mutation in any of the amino acid sequences provided herein, wherein X is any amino acid. In some embodiments, the SpCas9 domain comprises one or more of a D135E, R1335Q, and T1337R mutation, or a corresponding mutation in any of the amino acid sequences provided herein. In some embodiments, the SpCas9 domain comprises a D135E, a R1335Q, and a T1337R mutation, or corresponding mutations in any of the amino acid sequences provided herein. In some embodiments, the SpCas9 domain comprises one or more of a D1135X, a R1335X, and a T1337X mutation, or a corresponding mutation in any of the amino acid sequences provided herein, wherein X is any amino acid. In some embodiments, the SpCas9 domain comprises one or more of a D135V, a R1335Q, and a T1337R mutation, or a corresponding mutation in any of the amino acid sequences provided herein. In some embodiments, the SpCas9 domain comprises a D1135V, a R1335Q, and a T1337R mutation, or corresponding mutations in any of the amino acid sequences provided herein. In some embodiments, the SpCas9 domain comprises one or more of a D1135X, a G1218X, a R1335X, and a T1337X mutation, or a corresponding mutation in any of the amino acid sequences provided herein, wherein X is any amino acid. In some embodiments, the SpCas9 domain comprises one or more of a D135V, a G1218R, a R1335Q, and a T1337R mutation, or a corresponding mutation in any of the amino acid sequences provided herein. In some embodiments, the SpCas9 domain comprises a D1135V, a G1218R, a R1335Q, and a T1337R mutation, or corresponding mutations in any of the amino acid sequences provided herein.

[0573] In some examples, a PAM recognized by a CRISPR protein-derived domain of a base editor disclosed herein can be provided to a cell on a separate oligonucleotide to an insert (e.g., an AAV insert) encoding the base editor. In such embodiments, providing PAM on a separate oligonucleotide can allow cleavage of a target sequence that otherwise would not be able to be cleaved, because no adjacent PAM is present on the same polynucleotide as the target sequence.

[0574] In an embodiment, S. pyogenes Cas9 (SpCas9) can be used as a CRISPR endonuclease for genome engineering. However, others can be used. In some embodiments, a different endonuclease can be used to target certain genomic targets. In some embodiments, synthetic SpCas9-derived variants with non-NGG PAM sequences can be used. Additionally, other Cas9 orthologues from various species have been identified and these “non-SpCas9s” can bind a variety of PAM sequences that can also be useful for the present disclosure. For example, the relatively large size of SpCas9 (approximately 4 kb coding sequence) can lead to plasmids carrying the SpCas9 cDNA that cannot be efficiently expressed in a cell. Conversely, the coding sequence for Staphylococcus aureus Cas9 (SaCas9) is approximately 1 kilobase shorter than SpCas9, possibly allowing it to be efficiently expressed in a cell. Similar to SpCas9, the SaCas9 endonuclease is capable of modifying target genes in mammalian cells in vitro and in mice in vivo. In some embodiments, a Cas protein can target a different PAM sequence. In some embodiments, a target gene can be adjacent to a Cas9 PAM, 5′-NGG, for example. In other embodiments, other Cas9 orthologs can have different PAM requirements. For example, other PAMs such as those of S. thermophilus (5′-NNAGAA for CRISPR1 and 5′-NGGNG for CRISPR3) and Neisseria meningitidis (5′-NNNNGATT) can also be found adjacent to a target gene.

[0575] In some embodiments, for a S. pyogenes system, a target gene sequence can precede (i.e., be 5′ to) a 5′-NGG PAM, and a 20-nt guide RNA sequence can base pair with an opposite strand to mediate a Cas9 cleavage adjacent to a PAM. In some embodiments, an adjacent cut can be or can be about 3 base pairs upstream of a PAM. In some embodiments, an adjacent cut can be or can be about 10 base pairs upstream of a PAM. In some embodiments, an adjacent cut can be or can be about 0-20 base pairs upstream of a PAM. For example, an adjacent cut can be next to, 1, 2, 3, 4, 5, 6, 7, 8, 9, 10, 11, 12, 13, 14, 15, 16, 17, 18, 19, 20, 21, 22, 23, 24, 25, 26, 27, 28, 29, or 30 base pairs upstream of a PAM. An adjacent cut can also be downstream of a PAM by 1 to 30 base pairs. The sequences of exemplary SpCas9 proteins capable of binding a PAM sequence follow:

[0576] In some embodiments, engineered SpCas9 variants are capable of recognizing protospacer adjacent motif (PAM) sequences flanked by a 3′ H (non-G PAM) (see Tables 3A-3D). In some embodiments, the SpCas9 variants recognize NRNH PAMs (where R is A or G and H is A, C or T). In some embodiments, the non-G PAM is NRRH, NRTH, or NRCH (see e.g., Miller, S. M., et al. Continuous evolution of SpCas9 variants compatible with non-G PAMs, Nat. Biotechnol. (2020), the contents of which is incorporated herein by reference in its entirety).

[0577] In some embodiments, the Cas9 domain is a recombinant Cas9 domain. In some embodiments, the recombinant Cas9 domain is a SpyMacCas9 domain. In some embodiments, the SpyMacCas9 domain is a nuclease active SpyMacCas9, a nuclease inactive SpyMacCas9 (SpyMacCas9d), or a SpyMacCas9 nickase (SpyMacCas9n). In some embodiments, the SaCas9 domain, the SaCas9d domain, or the SaCas9n domain can bind to a nucleic acid sequence having a non-canonical PAM. In some embodiments, the SpyMacCas9 domain, the SpCas9d domain, or the SpCas9n domain can bind to a nucleic acid sequence having a NAA PAM sequence.

[0578] The sequence of an exemplary Cas9 A homolog of Spy Cas9 in Streptococcus macacae with native 5′-NAAN-3′ PAM specificity is known in the art and described, for example, by Jakimo et al., (Chatterjee, et al., “A Cas9 with PAM recognition for adenine dinucleotides”. Nature Communications, vol. 11, article no. 2474 (2020)), and is in the Sequence Listing as SEQ ID NO: 237.

[0579] In some embodiments, a variant Cas9 protein harbors, H840A, P475A, W476A, N477A, D1125A, W1126A, and D1218A mutations such that the polypeptide has a reduced ability to cleave a target DNA or RNA. Such a Cas9 protein has a reduced ability to cleave a target DNA (e.g., a single stranded target DNA) but retains the ability to bind a target DNA (e.g., a single stranded target DNA). As another non-limiting example, in some embodiments, the variant Cas9 protein harbors D10A, H840A, P475A, W476A, N477A, D1125A, W1126A, and D1218A mutations such that the polypeptide has a reduced ability to cleave a target DNA. Such a Cas9 protein has a reduced ability to cleave a target DNA (e.g., a single stranded target DNA) but retains the ability to bind a target DNA (e.g., a single stranded target DNA). In some embodiments, when a variant Cas9 protein harbors W476A and W1126A mutations or when the variant Cas9 protein harbors P475A, W476A, N477A, D1125A, W1126A, and D1218A mutations, the variant Cas9 protein does not bind efficiently to a PAM sequence. Thus, in some such cases, when such a variant Cas9 protein is used in a method of binding, the method does not require a PAM sequence. In other words, in some embodiments, when such a variant Cas9 protein is used in a method of binding, the method can include a guide RNA, but the method can be performed in the absence of a PAM sequence (and the specificity of binding is therefore provided by the targeting segment of the guide RNA). Other residues can be mutated to achieve the above effects (i.e., inactivate one or the other nuclease portions). As non-limiting examples, residues D10, G12, G17, E762, H840, N854, N863, H982, H983, A984, D986, and/or A987 can be altered (i.e., substituted). Also, mutations other than alanine substitutions are suitable.

[0580] In some embodiments, a CRISPR protein-derived domain of a base editor can comprise all or a portion of a Cas9 protein with a canonical PAM sequence (NGG). In other embodiments, a Cas9-derived domain of a base editor can employ a non-canonical PAM sequence. Such sequences have been described in the art and would be apparent to the skilled artisan. For example, Cas9 domains that bind non-canonical PAM sequences have been described in Kleinstiver, B. P., et al., “Engineered CRISPR-Cas9 nucleases with altered PAM specificities” Nature 523, 481-485 (2015); and Kleinstiver, B. P., et al., “Broadening the targeting range of Staphylococcus aureus CRISPR-Cas9 by modifying PAM recognition” Nature Biotechnology 33, 1293-1298 (2015); R. T. Walton et al. “Unconstrained genome targeting with near-PAMless engineered CRISPR-Cas9 variants” Science 10.1126/science.aba8853 (2020); Hu et al. “Evolved Cas9 variants with broad PAM compatibility and high DNA specificity,” Nature, 2018 Apr. 5, 556(7699), 57-63; Miller et al., “Continuous evolution of SpCas9 variants compatible with non-G PAMs” Nat. Biotechnol., 2020 April; 38(4):471-481; the entire contents of each are hereby incorporated by reference.

[0581] Fusion Proteins Comprising a NapDNAbp and a Cytidine Deaminase and/or Adenosine Deaminase

[0582] Some aspects of the disclosure provide fusion proteins comprising a Cas9 domain or other nucleic acid programmable DNA binding protein (e.g., Cas12) and one or more cytidine deaminase or adenosine deaminase domains. It should be appreciated that the Cas9 domain may be any of the Cas9 domains or Cas9 proteins (e.g., dCas9 or nCas9) provided herein. In some embodiments, any of the Cas9 domains or Cas9 proteins (e.g., dCas9 or nCas9) provided herein may be fused with any of the cytidine deaminases and/or adenosine deaminases provided herein. The domains of the base editors disclosed herein can be arranged in any order.

[0583] In some embodiments, the fusion protein comprises the following domains A-C, A-D, or A-E:
[0584] NH₂-[A-B-C]-COOH;
[0585] NH₂-[A-B-C-D]-COOH; or
[0586] NH₂-[A-B-C-D-E]-COOH;
   wherein A and C or A, C, and E, each comprises one or more of the following:
[0587] an adenosine deaminase domain or an active fragment thereof,
[0588] a cytidine deaminase domain or an active fragment thereof, and
[0589] wherein B or B and D, each comprises one or more domains having nucleic acid sequence specific binding activity.

[0590] In some embodiments, the fusion protein comprises the following structure:
[0591] NH₂-[Aₙ-Bₒ-Cₙ]-COOH;
[0592] NH₂-[Aₙ-Bₒ-Cₙ-Dₒ]-COOH; or
[0593] NH₂-[Aₙ-Bₒ-Cₚ-Dₒ-E_{q}]-COOH;
   wherein A and C or A, C, and E, each comprises one or more of the following:
[0594] an adenosine deaminase domain or an active fragment thereof,
[0595] a cytidine deaminase domain or an active fragment thereof, and
   wherein n is an integer: 1, 2, 3, 4, or 5, wherein p is an integer: 0, 1, 2, 3, 4, or 5; wherein q is an integer 0, 1, 2, 3, 4, or 5; and wherein B or B and D each comprises a domain having nucleic acid sequence specific binding activity; and wherein o is an integer: 1, 2, 3, 4, or 5.

[0596] For example, and without limitation, in some embodiments, the fusion protein comprises the structure:
[0597] NH2-[adenosine deaminase]-[Cas9 domain]-COOH;
[0598] NH2-[Cas9 domain]-[adenosine deaminase]-COOH;
[0599] NH2-[cytidine deaminase]-[Cas9 domain]-COOH;
[0600] NH2-[Cas9 domain]-[cytidine deaminase]-COOH;
[0601] NH2-[cytidine deaminase]-[Cas9 domain]-[adenosine deaminase]-COOH;
[0602] NH2-[adenosine deaminase]-[Cas9 domain]-[cytidine deaminase]-COOH;
[0603] NH2-[adenosine deaminase]-[cytidine deaminase]-[Cas9 domain]-COOH;
[0604] NH2-[cytidine deaminase]-[adenosine deaminase]-[Cas9 domain]-COOH;
[0605] NH2-[Cas9 domain]-[adenosine deaminase]-[cytidine deaminase]-COOH; or
[0606] NH2-[Cas9 domain]-[cytidine deaminase]-[adenosine deaminase]-COOH.

[0607] In some embodiments, any of the Cas12 domains or Cas12 proteins provided herein may be fused with any of the cytidine or adenosine deaminases provided herein. For example, and without limitation, in some embodiments, the fusion protein comprises the structure:
[0608] NH2-[adenosine deaminase]-[Cas12 domain]-COOH;
[0609] NH2-[Cas12 domain]-[adenosine deaminase]-COOH;
[0610] NH2-[cytidine deaminase]-[Cas12 domain]-COOH;
[0611] NH2-[Cas12 domain]-[cytidine deaminase]-COOH;
[0612] NH2-[cytidine deaminase]-[Cas12 domain]-[adenosine deaminase]-COOH;
[0613] NH2-[adenosine deaminase]-[Cas12 domain]-[cytidine deaminase]-COOH;
[0614] NH2-[adenosine deaminase]-[cytidine deaminase]-[Cas12 domain]-COOH;
[0615] NH2-[cytidine deaminase]-[adenosine deaminase]-[Cas12 domain]-COOH;
[0616] NH2-[Cas12 domain]-[adenosine deaminase]-[cytidine deaminase]-COOH; or
[0617] NH2-[Cas12 domain]-[cytidine deaminase]-[adenosine deaminase]-COOH.

[0618] In some embodiments, the adenosine deaminase is a TadA*8. Exemplary fusion protein structures include the following:
[0619] NH2-[TadA*8]-[Cas9 domain]-COOH;
[0620] NH2-[Cas9 domain]-[TadA*8]-COOH;
[0621] NH2-[TadA*8]-[Cas12 domain]-COOH; or
[0622] NH2-[Cas12 domain]-[TadA*8]-COOH.

[0623] In some embodiments, the adenosine deaminase of the fusion protein comprises a TadA*8 and a cytidine deaminase and/or an adenosine deaminase. In some embodiments, the TadA*8 is TadA*8.1, TadA*8.2, TadA*8.3, TadA*8.4, TadA*8.5, TadA*8.6, TadA*8.7, TadA*8.8, TadA*8.9, TadA*8.10, TadA*8.11, TadA*8.12, TadA*8.13, TadA*8.14, TadA*8.15, TadA*8.16, TadA*8.17, TadA*8.18, TadA*8.19, TadA*8.20, TadA*8.21, TadA*8.22, TadA*8.23, or TadA*8.24.

[0624] Exemplary fusion protein structures include the following:
[0625] NH2-[TadA*8]-[Cas9/Cas12]-[adenosine deaminase]-COOH;
[0626] NH2-[adenosine deaminase]-[Cas9/Cas12]-[TadA*8]-COOH;
[0627] NH2-[TadA*8]-[Cas9/Cas12]-[cytidine deaminase]-COOH; or
[0628] NH2-[cytidine deaminase]-[Cas9/Cas12]-[TadA*8]-COOH.

[0629] In some embodiments, the adenosine deaminase of the fusion protein comprises a TadA*9 and a cytidine deaminase and/or an adenosine deaminase. Exemplary fusion protein structures include the following:
[0630] NH2-[TadA*9]-[Cas9/Cas12]-[adenosine deaminase]-COOH;
[0631] NH2-[adenosine deaminase]-[Cas9/Cas12]-[TadA*9]-COOH;
[0632] NH2-[TadA*9]-[Cas9/Cas12]-[cytidine deaminase]-COOH; or
[0633] NH2-[cytidine deaminase]-[Cas9/Cas12]-[TadA*9]-COOH.

[0634] In some embodiments, the fusion protein can comprise a deaminase flanked by an N-terminal fragment and a C-terminal fragment of a Cas9 or Cas12 polypeptide. In some embodiments, the fusion protein comprises a cytidine deaminase flanked by an N-terminal fragment and a C-terminal fragment of a Cas9 or Cas12 polypeptide. In some embodiments, the fusion protein comprises an adenosine deaminase flanked by an N-terminal fragment and a C-terminal fragment of a Cas9 or Cas12 polypeptide.

[0635] In some embodiments, the fusion proteins comprising a cytidine deaminase or adenosine deaminase and a napDNAbp (e.g., Cas9 or Cas12 domain) do not include a linker sequence. In some embodiments, a linker is present between the cytidine or adenosine deaminase and the napDNAbp. In some embodiments, the “-” used in the general architecture above indicates the presence of an optional linker. In some embodiments, cytidine or adenosine deaminase and the napDNAbp are fused via any of the linkers provided herein. For example, in some embodiments the cytidine or adenosine deaminase and the napDNAbp are fused via any of the linkers provided herein.

[0636] It should be appreciated that the fusion proteins of the present disclosure may comprise one or more additional features. For example, in some embodiments, the fusion protein may comprise inhibitors, cytoplasmic localization sequences, export sequences, such as nuclear export sequences, or other localization sequences, as well as sequence tags that are useful for solubilization, purification, or detection of the fusion proteins. Suitable protein tags provided herein include, but are not limited to, biotin carboxylase carrier protein (BCCP) tags, myc-tags, calmodulin-tags, FLAG-tags, hemagglutinin (HA)-tags, polyhistidine tags, also referred to as histidine tags or His-tags, maltose binding protein (MBP)-tags, nus-tags, glutathione-S-transferase (GST)-tags, green fluorescent protein (GFP)-tags, thioredoxin-tags, S-tags, Softags (e.g., Softag 1, Softag 3), strep-tags, biotin ligase tags, FlAsH tags, V5 tags, and SBP-tags. Additional suitable sequences will be apparent to those of skill in the art. In some embodiments, the fusion protein comprises one or more His tags.

[0637] Exemplary, yet nonlimiting, fusion proteins are described in International PCT Application Nos. PCT/2017/044935, PCT/US2019/044935, and PCT/US2020/016288, each of which is incorporated herein by reference for its entirety.

### Fusion Proteins Comprising a Nuclear Localization Sequence (NLS)

[0638] In some embodiments, the fusion proteins provided herein further comprise one or more (e.g., 2, 3, 4, 5) nuclear targeting sequences, for example a nuclear localization sequence (NLS). In one embodiment, a bipartite NLS is used. In some embodiments, a NLS comprises an amino acid sequence that facilitates the importation of a protein, that comprises an NLS, into the cell nucleus (e.g., by nuclear transport). In some embodiments, the NLS is fused to the N-terminus or the C-terminus of the fusion protein. In some embodiments, the NLS is fused to the C-terminus or N-terminus of an nCas9 domain or a dCas9 domain. In some embodiments, the NLS is fused to the N-terminus or C-terminus of the Cas12 domain. In some embodiments, the NLS is fused to the N-terminus or C-terminus of the cytidine or adenosine deaminase. In some embodiments, the NLS is fused to the fusion protein via one or more linkers. In some embodiments, the NLS is fused to the fusion protein without a linker. In some embodiments, the NLS comprises an amino acid sequence of any one of the NLS sequences provided or referenced herein. Additional nuclear localization sequences are known in the art and would be apparent to the skilled artisan. For example, NLS sequences are described in Plank et al., PCT/EP2000/011690, the contents of which are incorporated herein by reference for their disclosure of exemplary nuclear localization sequences. In some embodiments, an NLS comprises the amino acid sequence

(SEQ ID NO: 328)
PKKKRKVEGADKRTADGSEFESPKKKRKV,
(SEQ ID NO: 190)
KRTADGSEFESPKKKRKV,
(SEQ ID NO: 191)
KRPAATKKAGQAKKKK,
(SEQ ID NO: 192)
KKTELQTTNAENKTKKL,
(SEQ ID NO: 193)
KRGINDRNFWRGENGRKTR,
(SEQ ID NO: 329)
RKSGKIAAIVVKRPRKPKKKRKV,
or
(SEQ ID NO: 196)
MDSLLMNRRKFLYQFKNVRWAKGRRETYLC.

[0639] In some embodiments, the fusion proteins comprising a cytidine or adenosine deaminase, a Cas9 domain, and an NLS do not comprise a linker sequence. In some embodiments, linker sequences between one or more of the domains or proteins (e.g., cytidine or adenosine deaminase, Cas9 domain or NLS) are present. In some embodiments, a linker is present between the cytidine deaminase and adenosine deaminase domains and the napDNAbp. In some embodiments, the “-” used in the general architecture below indicates the presence of an optional linker. In some embodiments, the cytidine deaminase and adenosine deaminase and the napDNAbp are fused via any of the linkers provided herein. For example, in some embodiments the cytidine deaminase and adenosine deaminase and the napDNAbp are fused via any of the linkers provided herein.

[0640] In some embodiments, the general architecture of exemplary napDNAbp (e.g., Cas9 or Cas12) fusion proteins with a cytidine or adenosine deaminase and a napDNAbp (e.g., Cas9 or Cas12) domain comprises any one of the following structures, where NLS is a nuclear localization sequence (e.g., any NLS provided herein), NH₂ is the N-terminus of the fusion protein, and COOH is the C-terminus of the fusion protein:
[0641] NH₂-NLS-[cytidine deaminase]-[napDNAbp domain]-COOH;
[0642] NH₂-NLS [napDNAbp domain]-[cytidine deaminase]-COOH;
[0643] NH₂-[cytidine deaminase]-[napDNAbp domain]-NLS—COOH;
[0644] NH₂-[napDNAbp domain]-[cytidine deaminase]-NLS—COOH;
[0645] NH₂-NLS-[adenosine deaminase]-[napDNAbp domain]-COOH;
[0646] NH₂-NLS [napDNAbp domain]-[adenosine deaminase]-COOH;
[0647] NH₂-[adenosine deaminase]-[napDNAbp domain]-NLS—COOH;
[0648] NH₂-[napDNAbp domain]-[adenosine deaminase]-NLS—COOH;
[0649] NH₂-NLS-[cytidine deaminase]-[napDNAbp domain]-[adenosine deaminase]-COOH;
[0650] NH₂-NLS-[adenosine deaminase]-[napDNAbp domain]-[cytidine deaminase]-COOH;
[0651] NH₂-NLS-[adenosine deaminase] [cytidine deaminase]-[napDNAbp domain]-COOH;
[0652] NH₂-NLS-[cytidine deaminase]-[adenosine deaminase]-[napDNAbp domain]-COOH;
[0653] NH₂-NLS-[napDNAbp domain]-[adenosine deaminase]-[cytidine deaminase]-COOH;
[0654] NH₂-NLS-[napDNAbp domain]-[cytidine deaminase]-[adenosine deaminase]-COOH;
[0655] NH₂-[cytidine deaminase]-[napDNAbp domain]-[adenosine deaminase]-NLS—COOH;
[0656] NH₂-[adenosine deaminase]-[napDNAbp domain]-[cytidine deaminase]-NLS—COOH;
[0657] NH₂-[adenosine deaminase] [cytidine deaminase]-[napDNAbp domain]-NLS—COOH;
[0658] NH₂-[cytidine deaminase]-[adenosine deaminase]-[napDNAbp domain]-NLS—COOH;
[0659] NH₂-[napDNAbp domain]-[adenosine deaminase]-[cytidine deaminase]-NLS—COOH; or
[0660] NH₂-[napDNAbp domain]-[cytidine deaminase]-[adenosine deaminase]-NLS—COOH.
   In some embodiments, the NLS is present in a linker or the NLS is flanked by linkers, for example described herein. A bipartite NLS comprises two basic amino acid clusters, which are separated by a relatively short spacer sequence (hence bipartite—2 parts, while monopartite NLSs are not). The NLS of nucleoplasmin, KR [PAATKKAGQA] KKKK (SEQ ID NO: 191), is the prototype of the ubiquitous bipartite signal: two clusters of basic amino acids, separated by a spacer of about 10 amino acids. The sequence of an exemplary bipartite NLS follows:

(SEQ ID NO: 328)
PKKKRKVEGADKRTADGSEFESPKKKRKV

[0661] A vector that encodes a CRISPR enzyme comprising one or more nuclear localization sequences (NLSs) can be used. For example, there can be or be about 1, 2, 3, 4, 5, 6, 7, 8, 9, 10 NLSs used. A CRISPR enzyme can comprise the NLSs at or near the amino-terminus, about or more than about 1, 2, 3, 4, 5, 6, 7, 8, 9, 10 NLSs at or near the carboxy-terminus, or any combination thereof (e.g., one or more NLS at the amino-terminus and one or more NLS at the carboxy terminus). When more than one NLS is present, each can be selected independently of others, such that a single NLS can be present in more than one copy and/or in combination with one or more other NLSs present in one or more copies.

[0662] CRISPR enzymes used in the methods can comprise about 6 NLSs. An NLS is considered near the N- or C-terminus when the nearest amino acid to the NLS is within about 50 amino acids along a polypeptide chain from the N- or C-terminus, e.g., within 1, 2, 3, 4, 5, 10, 15, 20, 25, 30, 40, or 50 amino acids.

### Additional Domains

[0663] A base editor described herein can include any domain which helps to facilitate the nucleobase editing, modification or altering of a nucleobase of a polynucleotide. In some embodiments, a base editor comprises a polynucleotide programmable nucleotide binding domain (e.g., Cas9), a nucleobase editing domain (e.g., deaminase domain), and one or more additional domains. In some embodiments, the additional domain can facilitate enzymatic or catalytic functions of the base editor, binding functions of the base editor, or be inhibitors of cellular machinery (e.g., enzymes) that could interfere with the desired base editing result. In some embodiments, a base editor can comprise a nuclease, a nickase, a recombinase, a deaminase, a methyltransferase, a methylase, an acetylase, an acetyltransferase, a transcriptional activator, or a transcriptional repressor domain.

[0664] In some embodiments, a base editor can comprise an uracil glycosylase inhibitor (UGI) domain. In some embodiments, cellular DNA repair response to the presence of U: G heteroduplex DNA can be responsible for a decrease in nucleobase editing efficiency in cells.

[0665] In such embodiments, uracil DNA glycosylase (UDG) can catalyze removal of U from DNA in cells, which can initiate base excision repair (BER), mostly resulting in reversion of the U:G pair to a C:G pair. In such embodiments, BER can be inhibited in base editors comprising one or more domains that bind the single strand, block the edited base, inhibit UGI, inhibit BER, protect the edited base, and/or promote repairing of the non-edited strand. Thus, this disclosure contemplates a base editor fusion protein comprising a UGI domain.

[0666] In some embodiments, a base editor comprises as a domain all or a portion of a double-strand break (DSB) binding protein. For example, a DSB binding protein can include a Gam protein of bacteriophage Mu that can bind to the ends of DSBs and can protect them from degradation. See Komor, A. C., et al., “Improved base excision repair inhibition and bacteriophage Mu Gam protein yields C:G-to-T:A base editors with higher efficiency and product purity” Science Advances 3:eaao4774 (2017), the entire content of which is hereby incorporated by reference.

[0667] Additionally, in some embodiments, a Gam protein can be fused to an N terminus of a base editor. In some embodiments, a Gam protein can be fused to a C terminus of a base editor. The Gam protein of bacteriophage Mu can bind to the ends of double strand breaks (DSBs) and protect them from degradation. In some embodiments, using Gam to bind the free ends of DSB can reduce indel formation during the process of base editing. In some embodiments, 174-residue Gam protein is fused to the N terminus of the base editors. See Komor, A. C., et al., “Improved base excision repair inhibition and bacteriophage Mu Gam protein yields C:G-to-T:A base editors with higher efficiency and product purity” Science Advances 3:eaao4774 (2017). In some embodiments, a mutation or mutations can change the length of a base editor domain relative to a wild type domain. For example, a deletion of at least one amino acid in at least one domain can reduce the length of the base editor. In another case, a mutation or mutations do not change the length of a domain relative to a wild type domain. For example, substitutions in any domain does not change the length of the base editor.

[0668] Non-limiting examples of such base editors, where the length of all the domains is the same as the wild type domains, can include:
[0669] NH₂-[nucleobase editing domain]-Linker1-[APOBEC1]-Linker2-[nucleobase editing domain]-COOH;
[0670] NH₂-[nucleobase editing domain]-Linker1-[APOBEC1]-[nucleobase editing domain]-COOH;
[0671] NH₂-[nucleobase editing domain]-[APOBEC1]-Linker2-[nucleobase editing domain]-COOH;
[0672] NH₂-[nucleobase editing domain]-[APOBEC1]-[nucleobase editing domain]-COOH;
[0673] NH₂-[nucleobase editing domain]-Linker1-[APOBEC1]-Linker2-[nucleobase editing domain]-[UGI]-COOH;
[0674] NH₂-[nucleobase editing domain]-Linker1-[APOBEC1]-[nucleobase editing domain]-[UGI]-COOH;
[0675] NH₂-[nucleobase editing domain]-[APOBEC1]-Linker2-[nucleobase editing domain]-[UGI]-COOH;
[0676] NH₂-[nucleobase editing domain]-[APOBEC1]-[nucleobase editing domain]-[UGI]-COOH;
[0677] NH₂-[UGI]-[nucleobase editing domain]-Linker1-[APOBEC1]-Linker2-[nucleobase editing domain]-COOH;
[0678] NH₂-[UGI]-[nucleobase editing domain]-Linker1-[APOBEC1]-[nucleobase editing domain]-COOH;
[0679] NH₂-[UGI]-[nucleobase editing domain]-[APOBEC1]-Linker2-[nucleobase editing domain]-COOH; or
[0680] NH₂-[UGI]-[nucleobase editing domain]-[APOBEC1]-[nucleobase editing domain]-COOH.

### Base Editor System

[0681] Provided herein are systems, compositions, and methods for editing a nucleobase using a base editor system. In some embodiments, the base editor system comprises (1) a base editor (BE) comprising a polynucleotide programmable nucleotide binding domain and a nucleobase editing domain (e.g., a deaminase domain) for editing the nucleobase; and (2) a guide polynucleotide (e.g., guide RNA) in conjunction with the polynucleotide programmable nucleotide binding domain. In some embodiments, the base editor system is a cytidine base editor (CBE) or an adenosine base editor (ABE). In some embodiments, the polynucleotide programmable nucleotide binding domain is a polynucleotide programmable DNA or RNA binding domain. In some embodiments, the nucleobase editing domain is a deaminase domain. In some embodiments, a deaminase domain can be a cytidine deaminase or an cytosine deaminase. In some embodiments, a deaminase domain can be an adenine deaminase or an adenosine deaminase. In some embodiments, the adenosine base editor can deaminate adenine in DNA. In some embodiments, the base editor is capable of deaminating a cytidine in DNA.

[0682] In some embodiments, a base editing system as provided herein provides a new approach to genome editing that uses a fusion protein containing a catalytically defective Streptococcus pyogenes Cas9, a deaminase (e.g., cytidine or adenosine deaminase), and an inhibitor of base excision repair to induce programmable, single nucleotide (C→T or A→G) changes in DNA without generating double-strand DNA breaks, without requiring a donor DNA template, and without inducing an excess of stochastic insertions and deletions.

[0683] Details of nucleobase editing proteins are described in International PCT Application Nos. PCT/2017/045381 (WO2018/027078) and PCT/US2016/058344 (WO2017/070632), each of which is incorporated herein by reference for its entirety. Also see Komor, A. C., et al., “Programmable editing of a target base in genomic DNA without double-stranded DNA cleavage” Nature 533, 420-424 (2016); Gaudelli, N. M., et al., “Programmable base editing of A·T to G·C in genomic DNA without DNA cleavage” Nature 551, 464-471 (2017); and Komor, A. C., et al., “Improved base excision repair inhibition and bacteriophage Mu Gam protein yields C:G-to-T:A base editors with higher efficiency and product purity” Science Advances 3:eaao4774 (2017), the entire contents of which are hereby incorporated by reference.

[0684] Use of the base editor system provided herein comprises the steps of: (a) contacting a target nucleotide sequence of a polynucleotide (e.g., double- or single stranded DNA or RNA) of a subject with a base editor system comprising a nucleobase editor (e.g., an adenosine base editor or a cytidine base editor) and a guide polynucleic acid (e.g., gRNA), wherein the target nucleotide sequence comprises a targeted nucleobase pair; (b) inducing strand separation of said target region; (c) converting a first nucleobase of said target nucleobase pair in a single strand of the target region to a second nucleobase; and (d) cutting no more than one strand of said target region, where a third nucleobase complementary to the first nucleobase base is replaced by a fourth nucleobase complementary to the second nucleobase. It should be appreciated that in some embodiments, step (b) is omitted. In some embodiments, said targeted nucleobase pair is a plurality of nucleobase pairs in one or more genes. In some embodiments, the base editor system provided herein is capable of multiplex editing of a plurality of nucleobase pairs in one or more genes. In some embodiments, the plurality of nucleobase pairs is located in the same gene. In some embodiments, the plurality of nucleobase pairs is located in one or more genes, wherein at least one gene is located in a different locus.

[0685] In some embodiments, the cut single strand (nicked strand) is hybridized to the guide nucleic acid. In some embodiments, the cut single strand is opposite to the strand comprising the first nucleobase. In some embodiments, the base editor comprises a Cas9 domain. In some embodiments, the first base is adenine, and the second base is not a G, C, A, or T. In some embodiments, the second base is inosine.

[0686] In some embodiments, a single guide polynucleotide may be utilized to target a deaminase to a target nucleic acid sequence. In some embodiments, a single pair of guide polynucleotides may be utilized to target different deaminases to a target nucleic acid sequence.

[0687] The nucleobase components and the polynucleotide programmable nucleotide binding component of a base editor system may be associated with each other covalently or non-covalently. For example, in some embodiments, the deaminase domain can be targeted to a target nucleotide sequence by a polynucleotide programmable nucleotide binding domain. In some embodiments, a polynucleotide programmable nucleotide binding domain can be fused or linked to a deaminase domain. In some embodiments, a polynucleotide programmable nucleotide binding domain can target a deaminase domain to a target nucleotide sequence by non-covalently interacting with or associating with the deaminase domain. For example, in some embodiments, the nucleobase editing component, e.g., the deaminase component can comprise an additional heterologous portion or domain that is capable of interacting with, associating with, or capable of forming a complex with an additional heterologous portion or domain that is part of a polynucleotide programmable nucleotide binding domain. In some embodiments, the additional heterologous portion may be capable of binding to, interacting with, associating with, or forming a complex with a polypeptide. In some embodiments, the additional heterologous portion may be capable of binding to, interacting with, associating with, or forming a complex with a polynucleotide. In some embodiments, the additional heterologous portion may be capable of binding to a guide polynucleotide. In some embodiments, the additional heterologous portion may be capable of binding to a polypeptide linker. In some embodiments, the additional heterologous portion may be capable of binding to a polynucleotide linker. The additional heterologous portion may be a protein domain. In some embodiments, the additional heterologous portion may be a K Homology (KH) domain, a MS2 coat protein domain, a PP7 coat protein domain, a SfMu Com coat protein domain, a steril alpha motif, a telomerase Ku binding motif and Ku protein, a telomerase Sm7 binding motif and Sm7 protein, or an RNA recognition motif.

[0688] A base editor system may further comprise a guide polynucleotide component. It should be appreciated that components of the base editor system may be associated with each other via covalent bonds, noncovalent interactions, or any combination of associations and interactions thereof. In some embodiments, a deaminase domain can be targeted to a target nucleotide sequence by a guide polynucleotide. For example, in some embodiments, the nucleobase editing component of the base editor system, e.g., the deaminase component, can comprise an additional heterologous portion or domain (e.g., polynucleotide binding domain such as an RNA or DNA binding protein) that is capable of interacting with, associating with, or capable of forming a complex with a portion or segment (e.g., a polynucleotide motif) of a guide polynucleotide. In some embodiments, the additional heterologous portion or domain (e.g., polynucleotide binding domain such as an RNA or DNA binding protein) can be fused or linked to the deaminase domain. In some embodiments, the additional heterologous portion may be capable of binding to, interacting with, associating with, or forming a complex with a polypeptide. In some embodiments, the additional heterologous portion may be capable of binding to, interacting with, associating with, or forming a complex with a polynucleotide. In some embodiments, the additional heterologous portion may be capable of binding to a guide polynucleotide. In some embodiments, the additional heterologous portion may be capable of binding to a polypeptide linker. In some embodiments, the additional heterologous portion may be capable of binding to a polynucleotide linker. The additional heterologous portion may be a protein domain. In some embodiments, the additional heterologous portion may be a K Homology (KH) domain, a MS2 coat protein domain, a PP7 coat protein domain, a SfMu Com coat protein domain, a sterile alpha motif, a telomerase Ku binding motif and Ku protein, a telomerase Sm7 binding motif and Sm7 protein, or an RNA recognition motif.

[0689] In some embodiments, a base editor system can further comprise an inhibitor of base excision repair (BER) component. It should be appreciated that components of the base editor system may be associated with each other via covalent bonds, noncovalent interactions, or any combination of associations and interactions thereof. The inhibitor of BER component may comprise a base excision repair inhibitor. In some embodiments, the inhibitor of base excision repair can be a uracil DNA glycosylase inhibitor (UGI). In some embodiments, the inhibitor of base excision repair can be an inosine base excision repair inhibitor. In some embodiments, the inhibitor of base excision repair can be targeted to the target nucleotide sequence by the polynucleotide programmable nucleotide binding domain. In some embodiments, a polynucleotide programmable nucleotide binding domain can be fused or linked to an inhibitor of base excision repair. In some embodiments, a polynucleotide programmable nucleotide binding domain can be fused or linked to a deaminase domain and an inhibitor of base excision repair. In some embodiments, a polynucleotide programmable nucleotide binding domain can target an inhibitor of base excision repair to a target nucleotide sequence by non-covalently interacting with or associating with the inhibitor of base excision repair. For example, in some embodiments, the inhibitor of base excision repair component can comprise an additional heterologous portion or domain that is capable of interacting with, associating with, or capable of forming a complex with an additional heterologous portion or domain that is part of a polynucleotide programmable nucleotide binding domain. In some embodiments, the inhibitor of base excision repair can be targeted to the target nucleotide sequence by the guide polynucleotide. For example, in some embodiments, the inhibitor of base excision repair can comprise an additional heterologous portion or domain (e.g., polynucleotide binding domain such as an RNA or DNA binding protein) that is capable of interacting with, associating with, or capable of forming a complex with a portion or segment (e.g., a polynucleotide motif) of a guide polynucleotide. In some embodiments, the additional heterologous portion or domain of the guide polynucleotide (e.g., polynucleotide binding domain such as an RNA or DNA binding protein) can be fused or linked to the inhibitor of base excision repair. In some embodiments, the additional heterologous portion may be capable of binding to, interacting with, associating with, or forming a complex with a polynucleotide. In some embodiments, the additional heterologous portion may be capable of binding to a guide polynucleotide. In some embodiments, the additional heterologous portion may be capable of binding to a polypeptide linker. In some embodiments, the additional heterologous portion may be capable of binding to a polynucleotide linker. The additional heterologous portion may be a protein domain. In some embodiments, the additional heterologous portion may be a K Homology (KH) domain, a MS2 coat protein domain, a PP7 coat protein domain, a SfMu Com coat protein domain, a sterile alpha motif, a telomerase Ku binding motif and Ku protein, a telomerase Sm7 binding motif and Sm7 protein, or an RNA recognition motif.

[0690] In some embodiments, the base editor inhibits base excision repair (BER) of the edited strand. In some embodiments, the base editor protects or binds the non-edited strand. In some embodiments, the base editor comprises UGI activity. In some embodiments, the base editor comprises a catalytically inactive inosine-specific nuclease. In some embodiments, the base editor comprises nickase activity. In some embodiments, the intended edit of base pair is upstream of a PAM site. In some embodiments, the intended edit of base pair is 1, 2, 3, 4, 5, 6, 7, 8, 9, 10, 11, 12, 13, 14, 15, 16, 17, 18, 19, or 20 nucleotides upstream of the PAM site. In some embodiments, the intended edit of base-pair is downstream of a PAM site. In some embodiments, the intended edited base pair is 1, 2, 3, 4, 5, 6, 7, 8, 9, 10, 11, 12, 13, 14, 15, 16, 17, 18, 19, or 20 nucleotides downstream stream of the PAM site.

[0691] In some embodiments, the method does not require a canonical (e.g., NGG) PAM site. In some embodiments, the nucleobase editor comprises a linker or a spacer. In some embodiments, the linker or spacer is 1-25 amino acids in length. In some embodiments, the linker or spacer is 5-20 amino acids in length. In some embodiments, the linker or spacer is 10, 11, 12, 13, 14, 15, 16, 17, 18, 19, or 20 amino acids in length.

[0692] In some embodiments, the base editing fusion proteins provided herein need to be positioned at a precise location, for example, where a target base is placed within a defined region (e.g., a “deamination window”). In some embodiments, a target can be within a 4 base region. In some embodiments, such a defined target region can be approximately 15 bases upstream of the PAM. See Komor, A. C., et al., “Programmable editing of a target base in genomic DNA without double-stranded DNA cleavage” Nature 533, 420-424 (2016); Gaudelli, N. M., et al., “Programmable base editing of A·T to G·C in genomic DNA without DNA cleavage” Nature 551, 464-471 (2017); and Komor, A. C., et al., “Improved base excision repair inhibition and bacteriophage Mu Gam protein yields C:G-to-T:A base editors with higher efficiency and product purity” Science Advances 3:eaao4774 (2017), the entire contents of which are hereby incorporated by reference.

[0693] In some embodiments, the target region comprises a target window, wherein the target window comprises the target nucleobase pair. In some embodiments, the target window comprises 1-10 nucleotides. In some embodiments, the target window is 1, 2, 3, 4, 5, 6, 7, 8, 9, 10, 11, 12, 13, 14, 15, 16, 17, 18, 19, or 20 nucleotides in length. In some embodiments, the intended edit of base pair is within the target window. In some embodiments, the target window comprises the intended edit of base pair. In some embodiments, the method is performed using any of the base editors provided herein. In some embodiments, a target window is a deamination window. A deamination window can be the defined region in which a base editor acts upon and deaminates a target nucleotide. In some embodiments, the deamination window is within a 2, 3, 4, 5, 6, 7, 8, 9, or 10 base regions. In some embodiments, the deamination window is 5, 6, 7, 8, 9, 10, 11, 12, 13, 14, 15, 16, 17, 18, 19, 20, 21, 22, 23, 24, or 25 bases upstream of the PAM.

[0694] The base editors of the present disclosure can comprise any domain, feature or amino acid sequence which facilitates the editing of a target polynucleotide sequence. For example, in some embodiments, the base editor comprises a nuclear localization sequence (NLS). In some embodiments, an NLS of the base editor is localized between a deaminase domain and a polynucleotide programmable nucleotide binding domain. In some embodiments, an NLS of the base editor is localized C-terminal to a polynucleotide programmable nucleotide binding domain.

[0695] Other exemplary features that can be present in a base editor as disclosed herein are localization sequences, such as cytoplasmic localization sequences, export sequences, such as nuclear export sequences, or other localization sequences, as well as sequence tags that are useful for solubilization, purification, or detection of the fusion proteins. Suitable protein tags provided herein include, but are not limited to, biotin carboxylase carrier protein (BCCP) tags, myc-tags, calmodulin-tags, FLAG-tags, hemagglutinin (HA)-tags, polyhistidine tags, also referred to as histidine tags or His-tags, maltose binding protein (MBP)-tags, nus-tags, glutathione-S-transferase (GST)-tags, green fluorescent protein (GFP)-tags, thioredoxin-tags, S-tags, Softags (e.g., Softag 1, Softag 3), strep-tags, biotin ligase tags, FlAsH tags, V5 tags, and SBP-tags. Additional suitable sequences will be apparent to those of skill in the art. In some embodiments, the fusion protein comprises one or more His tags.

[0696] In some embodiments, non-limiting exemplary cytidine base editors (CBE) include BE1 (APOBEC1-XTEN-dCas9), BE2 (APOBEC1-XTEN-dCas9-UGI), BE3 (APOBEC1-XTEN-dCas9(A840H)-UGI), BE3-Gam, saBE3, saBE4-Gam, BE4, BE4-Gam, saBE4, or saB4E-Gam. BE4 extends the APOBEC1-Cas9n(D10A) linker to 32 amino acids and the Cas9n-UGI linker to 9 amino acids, and appends a second copy of UGI to the C-terminus of the construct with another 9-amino acid linker into a single base editor construct. The base editors saBE3 and saBE4 have the S. pyogenes Cas9n(D10A) replaced with the smaller S. aureus Cas9n(D10A). BE3-Gam, saBE3-Gam, BE4-Gam, and saBE4-Gam have 174 residues of Gam protein fused to the N-terminus of BE3, saBE3, BE4, and saBE4 via the 16 amino acid XTEN linker.

[0697] In some embodiments, the adenosine base editor (ABE) can deaminate adenine in DNA. In some embodiments, ABE is generated by replacing APOBEC1 component of BE3 with natural or engineered E. coli TadA, human ADAR2, mouse ADA, or human ADAT2. In some embodiments, ABE comprises evolved TadA variant. In some embodiments, the ABE is ABE 1.2 (TadA*-XTEN-nCas9-NLS). In some embodiments, TadA* comprises A106V and D108N mutations.

[0698] In some embodiments, the ABE is a second-generation ABE. In some embodiments, the ABE is ABE2.1, which comprises additional mutations D147Y and E155V in TadA* (TadA*2.1). In some embodiments, the ABE is ABE2.2, ABE2.1 fused to catalytically inactivated version of human alkyl adenine DNA glycosylase (AAG with E125Q mutation). In some embodiments, the ABE is ABE2.3, ABE2.1 fused to catalytically inactivated version of E. coli Endo V (inactivated with D35A mutation). In some embodiments, the ABE is ABE2.6 which has a linker twice as long (32 amino acids, (SGGS)₂ (SEQ ID NO: 330)-XTEN-(SGGS)₂ (SEQ ID NO: 330)) as the linker in ABE2.1. In some embodiments, the ABE is ABE2.7, which is ABE2.1 tethered with an additional wild-type TadA monomer. In some embodiments, the ABE is ABE2.8, which is ABE2.1 tethered with an additional TadA*2.1 monomer. In some embodiments, the ABE is ABE2.9, which is a direct fusion of evolved TadA (TadA*2.1) to the N-terminus of ABE2.1. In some embodiments, the ABE is ABE2.10, which is a direct fusion of wild-type TadA to the N-terminus of ABE2.1. In some embodiments, the ABE is ABE2.11, which is ABE2.9 with an inactivating E59A mutation at the N-terminus of TadA* monomer. In some embodiments, the ABE is ABE2.12, which is ABE2.9 with an inactivating E59A mutation in the internal TadA* monomer.

[0699] In some embodiments, the ABE is a third generation ABE. In some embodiments, the ABE is ABE3.1, which is ABE2.3 with three additional TadA mutations (L84F, H123Y, and I156F).

[0700] In some embodiments, the ABE is a fourth generation ABE. In some embodiments, the ABE is ABE4.3, which is ABE3.1 with an additional TadA mutation A142N (TadA*4.3).

[0701] In some embodiments, the ABE is a fifth generation ABE. In some embodiments, the ABE is ABE5.1, which is generated by importing a consensus set of mutations from surviving clones (H36L, R51L, S146C, and K157N) into ABE3.1. In some embodiments, the ABE is ABE5.3, which has a heterodimeric construct containing wild-type E. coli TadA fused to an internal evolved TadA*. In some embodiments, the ABE is ABE5.2, ABE5.4, ABE5.5, ABE5.6, ABE5.7, ABE5.8, ABE5.9, ABE5.10, ABE5.11, ABE5.12, ABE5.13, or ABE5.14, as shown in Table 11 below. In some embodiments, the ABE is a sixth generation ABE. In some embodiments, the ABE is ABE6.1, ABE6.2, ABE6.3, ABE6.4, ABE6.5, or ABE6.6, as shown in Table 11 below. In some embodiments, the ABE is a seventh generation ABE. In some embodiments, the ABE is ABE7.1, ABE7.2, ABE7.3, ABE7.4, ABE7.5, ABE7.6, ABE7.7, ABE7.8, ABE 7.9, or ABE7.10, as shown in Table 11 below.

TABLE 11
Genotypes of ABEs

| | 23 | 26 | 36 | 37 | 48 | 49 | 51 | 72 | 84 | 87 | 106 | 108 | 123 | 125 | 142 | 146 | 147 | 152 | 155 | 156 | 157 | 161 |
|---|---|---|---|---|---|---|---|---|---|---|---|---|---|---|---|---|---|---|---|---|---|---|
| ABE0.1 | W | R | H | N | P | | R | N | L | S | A | D | H | G | A | S | D | R | E | I | K | K |
| ABE0.2 | W | R | H | N | P | | R | N | L | S | A | D | H | G | A | S | D | R | E | I | K | K |
| ABE1.1 | W | R | H | N | P | | R | N | L | S | A | N | H | G | A | S | D | R | E | I | K | K |
| ABE1.2 | W | R | H | N | P | | R | N | L | S | V | N | H | G | A | S | D | R | E | I | K | K |
| ABE2.1 | W | R | H | N | P | | R | N | L | S | V | N | H | G | A | S | Y | R | V | I | K | K |
| ABE2.2 | W | R | H | N | P | | R | N | L | S | V | N | H | G | A | S | Y | R | V | I | K | K |
| ABE2.3 | W | R | H | N | P | | R | N | L | S | V | N | H | G | A | S | Y | R | V | I | K | K |
| ABE2.4 | W | R | H | N | P | | R | N | L | S | V | N | H | G | A | S | Y | R | V | I | K | K |
| ABE2.5 | W | R | H | N | P | | R | N | L | S | V | N | H | G | A | S | Y | R | V | I | K | K |
| ABE2.6 | W | R | H | N | P | | R | N | L | S | V | N | H | G | A | S | Y | R | V | I | K | K |
| ABE2.7 | W | R | H | N | P | | R | N | L | S | V | N | H | G | A | S | Y | R | V | I | K | K |
| ABE2.8 | W | R | H | N | P | | R | N | L | S | V | N | H | G | A | S | Y | R | V | I | K | K |
| ABE2.9 | W | R | H | N | P | | R | N | L | S | V | N | H | G | A | S | Y | R | V | I | K | K |
| ABE2.10 | W | R | H | N | P | | R | N | L | S | V | N | H | G | A | S | Y | R | V | I | K | K |
| ABE2.11 | W | R | H | N | P | | R | N | L | S | V | N | H | G | A | S | Y | R | V | I | K | K |
| ABE2.12 | W | R | H | N | P | | R | N | L | S | V | N | H | G | A | S | Y | R | V | I | K | K |
| ABE3.1 | W | R | H | N | P | | R | N | F | S | V | N | Y | G | A | S | Y | R | V | F | K | K |
| ABE3.2 | W | R | H | N | P | | R | N | F | S | V | N | Y | G | A | S | Y | R | V | F | K | K |
| ABE3.3 | W | R | H | N | P | | R | N | F | S | V | N | Y | G | A | S | Y | R | V | F | K | K |
| ABE3.4 | W | R | H | N | P | | R | N | F | S | V | N | Y | G | A | S | Y | R | V | F | K | K |
| ABE3.5 | W | R | H | N | P | | R | N | F | S | V | N | Y | G | A | S | Y | R | V | F | K | K |
| ABE3.6 | W | R | H | N | P | | R | N | F | S | V | N | Y | G | A | S | Y | R | V | F | K | K |
| ABE3.7 | W | R | H | N | P | | R | N | F | S | V | N | Y | G | A | S | Y | R | V | F | K | K |
| ABE3.8 | W | R | H | N | P | | R | N | F | S | V | N | Y | G | A | S | Y | R | V | F | K | K |
| ABE4.1 | W | R | H | N | P | | R | N | L | S | V | N | H | G | N | S | Y | R | V | I | K | K |
| ABE4.2 | W | G | H | N | P | | R | N | L | S | V | N | H | G | N | S | Y | R | V | I | K | K |
| ABE4.3 | W | R | H | N | P | | R | N | F | S | V | N | Y | G | N | S | Y | R | V | F | K | K |
| ABE5.1 | W | R | L | N | P | | L | N | F | S | V | N | Y | G | A | C | Y | R | V | F | N | K |
| ABE5.2 | W | R | H | S | P | | R | N | F | S | V | N | Y | G | A | S | Y | R | V | F | K | T |
| ABE5.3 | W | R | L | N | P | | L | N | I | S | V | N | Y | G | A | C | Y | R | V | F | N | K |
| ABE5.4 | W | R | H | S | P | | R | N | F | S | V | N | Y | G | A | S | Y | R | V | F | K | T |
| ABE5.5 | W | R | L | N | P | | L | N | F | S | V | N | Y | G | A | C | Y | R | V | F | N | K |
| ABE5.6 | W | R | L | N | P | | L | N | F | S | V | N | Y | G | A | C | Y | R | V | F | N | K |
| ABE5.7 | W | R | L | N | P | | L | N | F | S | V | N | Y | G | A | C | Y | R | V | F | N | K |
| ABE5.8 | W | R | L | N | P | | L | N | F | S | V | N | Y | G | A | C | Y | R | V | F | N | K |
| ABE5.9 | W | R | L | N | P | | L | N | F | S | V | N | Y | G | A | C | Y | R | V | F | N | K |
| ABE5.10 | W | R | L | N | P | | L | N | F | S | V | N | Y | G | A | C | Y | R | V | F | N | K |
| ABE5.11 | W | R | L | N | P | | L | N | F | S | V | N | Y | G | A | C | Y | R | V | F | N | K |
| ABE5.12 | W | R | L | N | P | | L | N | F | S | V | N | Y | G | A | C | Y | R | V | F | N | K |
| ABE5.13 | W | R | H | N | P | | L | D | F | S | V | N | Y | A | A | S | Y | R | V | F | K | K |
| ABE5.14 | W | R | H | N | S | | L | N | F | C | V | N | Y | G | A | S | Y | R | V | F | K | K |
| ABE6.1 | W | R | H | N | S | | L | N | F | S | V | N | Y | G | N | S | Y | R | V | F | K | K |
| ABE6.2 | W | R | H | N | T | V | L | N | F | S | V | N | Y | G | N | S | Y | R | V | F | N | K |
| ABE6.3 | W | R | L | N | S | | L | N | F | S | V | N | Y | G | A | C | Y | R | V | F | N | K |
| ABE6.4 | W | R | L | N | S | | L | N | F | S | V | N | Y | G | N | C | Y | R | V | F | N | K |
| ABE6.5 | W | R | L | N | T | V | L | N | F | S | V | N | Y | G | A | C | Y | R | V | F | N | K |
| ABE6.6 | W | R | L | N | T | V | L | N | F | S | V | N | Y | G | N | C | Y | R | V | F | N | K |
| ABE7.1 | W | R | L | N | A | | L | N | F | S | V | N | Y | G | A | C | Y | R | V | F | N | K |
| ABE7.2 | W | R | L | N | A | | L | N | F | S | V | N | Y | G | N | C | Y | R | V | F | N | K |
| ABE7.3 | L | R | L | N | A | | L | N | F | S | V | N | Y | G | A | C | Y | R | V | F | N | K |
| ABE7.4 | R | R | L | N | A | | L | N | F | S | V | N | Y | G | A | C | Y | R | V | F | N | K |
| ABE7.5 | W | R | L | N | A | | L | N | F | S | V | N | Y | G | A | C | Y | H | V | F | N | K |
| ABE7.6 | W | R | L | N | A | | L | N | I | S | V | N | Y | G | A | C | Y | P | V | F | N | K |
| ABE7.7 | L | R | L | N | A | | L | N | F | S | V | N | Y | G | A | C | Y | P | V | F | N | K |
| ABE7.8 | L | R | L | N | A | | L | N | F | S | V | N | Y | G | N | C | Y | R | V | F | N | K |
| ABE7.9 | L | R | L | N | A | | L | N | F | S | V | N | Y | G | N | C | Y | P | V | F | N | K |
| ABE7.10 | R | R | L | N | A | | L | N | F | S | V | N | Y | G | A | C | Y | P | V | F | N | K |

[0702] In some embodiments, the base editor is an eighth generation ABE (ABE8). In some embodiments, the ABE8 contains a TadA*8 variant. In some embodiments, the ABE8 has a monomeric construct containing a TadA*8 variant (“ABE8.x-m”). In some embodiments, the ABE8 is ABE8.1-m, which has a monomeric construct containing TadA*7.10 with a Y147T mutation (TadA*8.1). In some embodiments, the ABE8 is ABE8.2-m, which has a monomeric construct containing TadA*7.10 with a Y147R mutation (TadA*8.2). In some embodiments, the ABE8 is ABE8.3-m, which has a monomeric construct containing TadA*7.10 with a Q154S mutation (TadA*8.3). In some embodiments, the ABE8 is ABE8.4-m, which has a monomeric construct containing TadA*7.10 with a Y123H mutation (TadA*8.4). In some embodiments, the ABE8 is ABE8.5-m, which has a monomeric construct containing TadA*7.10 with a V82S mutation (TadA*8.5). In some embodiments, the ABE8 is ABE8.6-m, which has a monomeric construct containing TadA*7.10 with a T166R mutation (TadA*8.6). In some embodiments, the ABE8 is ABE8.7-m, which has a monomeric construct containing TadA*7.10 with a Q154R mutation (TadA*8.7). In some embodiments, the ABE8 is ABE8.8-m, which has a monomeric construct containing TadA*7.10 with Y147R, Q154R, and Y123H mutations (TadA*8.8). In some embodiments, the ABE8 is ABE8.9-m, which has a monomeric construct containing TadA*7.10 with Y147R, Q154R and I76Y mutations (TadA*8.9). In some embodiments, the ABE8 is ABE8.10-m, which has a monomeric construct containing TadA*7.10 with Y147R, Q154R, and T166R mutations (TadA*8.10). In some embodiments, the ABE8 is ABE8.11-m, which has a monomeric construct containing TadA*7.10 with Y147T and Q154R mutations (TadA*8.11). In some embodiments, the ABE8 is ABE8.12-m, which has a monomeric construct containing TadA*7.10 with Y147T and Q154S mutations (TadA*8.12).

[0703] In some embodiments, the ABE8 is ABE8.13-m, which has a monomeric construct containing TadA*7.10 with Y123H (Y123H reverted from H123Y), Y147R, Q154R and I76Y mutations (TadA*8.13). In some embodiments, the ABE8 is ABE8.14-m, which has a monomeric construct containing TadA*7.10 with I76Y and V82S mutations (TadA*8.14). In some embodiments, the ABE8 is ABE8.15-m, which has a monomeric construct containing TadA*7.10 with V82S and Y147R mutations (TadA*8.15). In some embodiments, the ABE8 is ABE8.16-m, which has a monomeric construct containing TadA*7.10 with V82S, Y123H (Y123H reverted from H123Y) and Y147R mutations (TadA*8.16). In some embodiments, the ABE8 is ABE8.17-m, which has a monomeric construct containing TadA*7.10 with V82S and Q154R mutations (TadA*8.17). In some embodiments, the ABE8 is ABE8.18-m, which has a monomeric construct containing TadA*7.10 with V82S, Y123H (Y123H reverted from H123Y) and Q154R mutations (TadA*8.18). In some embodiments, the ABE8 is ABE8.19-m, which has a monomeric construct containing TadA*7.10 with V82S, Y123H (Y123H reverted from H123Y), Y147R and Q154R mutations (TadA*8.19). In some embodiments, the ABE8 is ABE8.20-m, which has a monomeric construct containing TadA*7.10 with I76Y, V82S, Y123H (Y123H reverted from H123Y), Y147R and Q154R mutations (TadA*8.20). In some embodiments, the ABE8 is ABE8.21-m, which has a monomeric construct containing TadA*7.10 with Y147R and Q154S mutations (TadA*8.21). In some embodiments, the ABE8 is ABE8.22-m, which has a monomeric construct containing TadA*7.10 with V82S and Q154S mutations (TadA*8.22). In some embodiments, the ABE8 is ABE8.23-m, which has a monomeric construct containing TadA*7.10 with V82S and Y123H (Y123H reverted from H123Y) mutations (TadA*8.23). In some embodiments, the ABE8 is ABE8.24-m, which has a monomeric construct containing TadA*7.10 with V82S, Y123H (Y123H reverted from H123Y), and Y147T mutations (TadA*8.24).

[0704] In some embodiments, the ABE8 has a heterodimeric construct containing wild-type E. coli TadA fused to a TadA*8 variant (“ABE8.x-d”). In some embodiments, the ABE8 is ABE8.1-d, which has a heterodimeric construct containing wild-type E. coli TadA fused to TadA*7.10 with a Y147T mutation (TadA*8.1). In some embodiments, the ABE8 is ABE8.2-d, which has a heterodimeric construct containing wild-type E. coli TadA fused to TadA*7.10 with a Y147R mutation (TadA*8.2). In some embodiments, the ABE8 is ABE8.3-d, which has a heterodimeric construct containing wild-type E. coli TadA fused to TadA*7.10 with a Q154S mutation (TadA*8.3). In some embodiments, the ABE8 is ABE8.4-d, which has a heterodimeric construct containing wild-type E. coli TadA fused to TadA*7.10 with a Y123H mutation (TadA*8.4). In some embodiments, the ABE8 is ABE8.5-d, which has a heterodimeric construct containing wild-type E. coli TadA fused to TadA*7.10 with a V82S mutation (TadA*8.5). In some embodiments, the ABE8 is ABE8.6-d, which has a heterodimeric construct containing wild-type E. coli TadA fused to TadA*7.10 with a T166R mutation (TadA*8.6). In some embodiments, the ABE8 is ABE8.7-d, which has a heterodimeric construct containing wild-type E. coli TadA fused to TadA*7.10 with a Q154R mutation (TadA*8.7). In some embodiments, the ABE8 is ABE8.8-d, which has a heterodimeric construct containing wild-type E. coli TadA fused to TadA*7.10 with Y147R, Q154R, and Y123H mutations (TadA*8.8). In some embodiments, the ABE8 is ABE8.9-d, which has a heterodimeric construct containing wild-type E. coli TadA fused to TadA*7.10 with Y147R, Q154R and I76Y mutations (TadA*8.9). In some embodiments, the ABE8 is ABE8.10-d, which has a heterodimeric construct containing wild-type E. coli TadA fused to TadA*7.10 with Y147R, Q154R, and T166R mutations (TadA*8.10). In some embodiments, the ABE8 is ABE8.11-d, which has a heterodimeric construct containing wild-type E. coli TadA fused to TadA*7.10 with Y147T and Q154R mutations (TadA*8.11). In some embodiments, the ABE8 is ABE8.12-d, which has heterodimeric construct containing wild-type E. coli TadA fused to TadA*7.10 with Y147T and Q154S mutations (TadA*8.12). In some embodiments, the ABE8 is ABE8.13-d, which has a heterodimeric construct containing wild-type E. coli TadA fused to TadA*7.10 with Y123H (Y123H reverted from H123Y), Y147R, Q154R and I76Y mutations (TadA*8.13). In some embodiments, the ABE8 is ABE8.14-d, which has a heterodimeric construct containing wild-type E. coli TadA fused to TadA*7.10 with I76Y and V82S mutations (TadA*8.14). In some embodiments, the ABE8 is ABE8.15-d, which has a heterodimeric construct containing wild-type E. coli TadA fused to TadA*7.10 with V82S and Y147R mutations (TadA*8.15). In some embodiments, the ABE8 is ABE8.16-d, which has a heterodimeric construct containing wild-type E. coli TadA fused to TadA*7.10 with V82S, Y123H (Y123H reverted from H123Y) and Y147R mutations (TadA*8.16). In some embodiments, the ABE8 is ABE8.17-d, which has a heterodimeric construct containing wild-type E. coli TadA fused to TadA*7.10 with V82S and Q154R mutations (TadA*8.17). In some embodiments, the ABE8 is ABE8.18-d, which has a heterodimeric construct containing wild-type E. coli TadA fused to TadA*7.10 with V82S, Y123H (Y123H reverted from H123Y) and Q154R mutations (TadA*8.18). In some embodiments, the ABE8 is ABE8.19-d, which has a heterodimeric construct containing wild-type E. coli TadA fused to TadA*7.10 with V82S, Y123H (Y123H reverted from H123Y), Y147R and Q154R mutations (TadA*8.19). In some embodiments, the ABE8 is ABE8.20-d, which has a heterodimeric construct containing wild-type E. coli TadA fused to TadA*7.10 with I76Y, V82S, Y123H (Y123H reverted from H123Y), Y147R and Q154R mutations (TadA*8.20). In some embodiments, the ABE8 is ABE8.21-d, which has a heterodimeric construct containing wild-type E. coli TadA fused to TadA*7.10 with Y147R and Q154S mutations (TadA*8.21). In some embodiments, the ABE8 is ABE8.22-d, which has a heterodimeric construct containing wild-type E. coli TadA fused to TadA*7.10 with V82S and Q154S mutations (TadA*8.22). In some embodiments, the ABE8 is ABE8.23-d, which has a heterodimeric construct containing wild-type E. coli TadA fused to TadA*7.10 with V82S and Y123H (Y123H reverted from H123Y) mutations (TadA*8.23). In some embodiments, the ABE8 is ABE8.24-d, which has a heterodimeric construct containing wild-type E. coli TadA fused to TadA*7.10 with V82S, Y123H (Y123H reverted from H123Y), and Y147T mutations (TadA*8.24).

[0705] In some embodiments, the ABE8 has a heterodimeric construct containing TadA*7.10 fused to a TadA*8 variant (“ABE8.x-7”). In some embodiments, the ABE8 is ABE8.1-7, which has a heterodimeric construct containing TadA*7.10 fused to TadA*7.10 with a Y147T mutation (TadA*8.1). In some embodiments, the ABE8 is ABE8.2-7, which has a heterodimeric construct containing TadA*7.10 fused to TadA*7.10 with a Y147R mutation (TadA*8.2). In some embodiments, the ABE8 is ABE8.3-7, which has a heterodimeric construct containing TadA*7.10 fused to TadA*7.10 with a Q154S mutation (TadA*8.3). In some embodiments, the ABE8 is ABE8.4-7, which has a heterodimeric construct containing TadA*7.10 fused to TadA*7.10 with a Y123H mutation (TadA*8.4). In some embodiments, the ABE8 is ABE8.5-7, which has a heterodimeric construct containing TadA*7.10 fused to TadA*7.10 with a V82S mutation (TadA*8.5). In some embodiments, the ABE8 is ABE8.6-7, which has a heterodimeric construct containing TadA*7.10 fused to TadA*7.10 with a T166R mutation (TadA*8.6). In some embodiments, the ABE8 is ABE8.7-7, which has a heterodimeric construct containing TadA*7.10 fused to TadA*7.10 with a Q154R mutation (TadA*8.7). In some embodiments, the ABE8 is ABE8.8-7, which has a heterodimeric construct containing TadA*7.10 fused to TadA*7.10 with Y147R, Q154R, and Y123H mutations (TadA*8.8). In some embodiments, the ABE8 is ABE8.9-7, which has a heterodimeric construct containing TadA*7.10 fused to TadA*7.10 with Y147R, Q154R and I76Y mutations (TadA*8.9). In some embodiments, the ABE8 is ABE8.10-7, which has a heterodimeric construct containing TadA*7.10 fused to TadA*7.10 with Y147R, Q154R, and T166R mutations (TadA*8.10). In some embodiments, the ABE8 is ABE8.11-7, which has a heterodimeric construct containing TadA*7.10 fused to TadA*7.10 with Y147T and Q154R mutations (TadA*8.11). In some embodiments, the ABE8 is ABE8.12-7, which has a heterodimeric construct containing TadA*7.10 fused to TadA*7.10 with Y147T and Q154S mutations (TadA*8.12). In some embodiments, the ABE8 is ABE8.13-7, which has a heterodimeric construct containing TadA*7.10 fused to TadA*7.10 with Y123H (Y123H reverted from H123Y), Y147R, Q154R and I76Y mutations (TadA*8.13). In some embodiments, the ABE8 is ABE8.14-7, which has a heterodimeric construct containing TadA*7.10 fused to TadA*7.10 with I76Y and V82S mutations (TadA*8.14). In some embodiments, the ABE8 is ABE8.15-7, which has a heterodimeric construct containing TadA*7.10 fused to TadA*7.10 with V82S and Y147R mutations (TadA*8.15). In some embodiments, the ABE8 is ABE8.16-7, which has a heterodimeric construct containing TadA*7.10 fused to TadA*7.10 with V82S, Y123H (Y123H reverted from H123Y) and Y147R mutations (TadA*8.16). In some embodiments, the ABE8 is ABE8.17-7, which has a heterodimeric construct containing TadA*7.10 fused to TadA*7.10 with V82S and Q154R mutations (TadA*8.17). In some embodiments, the ABE8 is ABE8.18-7, which has a heterodimeric construct containing TadA*7.10 fused to TadA*7.10 with V82S, Y123H (Y123H reverted from H123Y) and Q154R mutations (TadA*8.18). In some embodiments, the ABE8 is ABE8.19-7, which has a heterodimeric construct containing TadA*7.10 fused to TadA*7.10 with V82S, Y123H (Y123H reverted from H123Y), Y147R and Q154R mutations (TadA*8.19). In some embodiments, the ABE8 is ABE8.20-7, which has a heterodimeric construct containing TadA*7.10 fused to TadA*7.10 with I76Y, V82S, Y123H (Y123H reverted from H123Y), Y147R and Q154R mutations (TadA*8.20). In some embodiments, the ABE8 is ABE8.21-7, which has a heterodimeric construct containing TadA*7.10 fused to TadA*7.10 with Y147R and Q154S mutations (TadA*8.21). In some embodiments, the ABE8 is ABE8.22-7, which has a heterodimeric construct containing TadA*7.10 fused to TadA*7.10 with V82S and Q154S mutations (TadA*8.22). In some embodiments, the ABE8 is ABE8.23-7, which has a heterodimeric construct containing TadA*7.10 fused to TadA*7.10 with V82S and Y123H (Y123H reverted from H123Y) mutations (TadA*8.23). In some embodiments, the ABE8 is ABE8.24-7, which has a heterodimeric construct containing TadA*7.10 fused to TadA*7.10 with V82S, Y123H (Y123H reverted from H123Y), and Y147T mutations (TadA*8.24
[0706] [1] In some embodiments, the ABE is ABE8.1-m, ABE8.2-m, ABE8.3-m, ABE8.4-m, ABE8.5-m, ABE8.6-m, ABE8.7-m, ABE8.8-m, ABE8.9-m, ABE8.10-m, ABE8.11-m, ABE8.12-m, ABE8.13-m, ABE8.14-m, ABE8.15-m, ABE8.16-m, ABE8.17-m, ABE8.18-m, ABE8.19-m, ABE8.20-m, ABE8.21-m, ABE8.22-m, ABE8.23-m, ABE8.24-m, ABE8.1-d, ABE8.2-d, ABE8.3-d, ABE8.4-d, ABE8.5-d, ABE8.6-d, ABE8.7-d, ABE8.8-d, ABE8.9-d, ABE8.10-d, ABE8.11-d, ABE8.12-d, ABE8.13-d, ABE8.14-d, ABE8.15-d, ABE8.16-d, ABE8.17-d, ABE8.18-d, ABE8.19-d, ABE8.20-d, ABE8.21-d, ABE8.22-d, ABE8.23-d, or ABE8.24-d as shown in Table 12 below.
[0707] [2]

TABLE 12
Adenosine Deaminase Base Editor 8 (ABE8) Variants

| ABE8 | Adenosine Deaminase | Adenosine Deaminase Description |
|---|---|---|
| ABE8.1-m | TadA*8.1 | Monomer_TadA*7.10 + Y147T |
| ABE8.2-m | TadA*8.2 | Monomer_TadA*7.10 + Y147R |
| ABE8.3-m | TadA*8.3 | Monomer_TadA*7.10 + Q154S |
| ABE8.4-m | TadA*8.4 | Monomer_TadA*7.10 + Y123H |
| ABE8.5-m | TadA*8.5 | Monomer_TadA*7.10 + V82S |
| ABE8.6-m | TadA*8.6 | Monomer_TadA*7.10 + T166R |
| ABE8.7-m | TadA*8.7 | Monomer_TadA*7.10 + Q154R |
| ABE8.8-m | TadA*8.8 | Monomer_TadA*7.10 + Y147R_Q154R_Y123H |
| ABE8.9-m | TadA*8.9 | Monomer_TadA*7.10 + Y147R_Q154R_I76Y |
| ABE8.10-m | TadA*8.10 | Monomer_TadA*7.10 + Y147R_Q154R_T166R |
| ABE8.11-m | TadA*8.11 | Monomer_TadA*7.10 + Y147T_Q154R |
| ABE8.12-m | TadA*8.12 | Monomer_TadA*7.10 + Y147T_Q154S |
| ABE8.13-m | TadA*8.13 | Monomer_TadA*7.10 + |
| | | Y123H_Y147R_Q154R_I76Y |
| ABE8.14-m | TadA*8.14 | Monomer_TadA*7.10 + I76Y_V82S |
| ABE8.15-m | TadA*8.15 | Monomer_TadA*7.10 + V82S_Y147R |
| ABE8.16-m | TadA*8.16 | Monomer_TadA*7.10 + V82S_Y123H_Y147R |
| ABE8.17-m | TadA*8.17 | Monomer_TadA*7.10 + V82S_Q154R |
| ABE8.18-m | TadA*8.18 | Monomer_TadA*7.10 + V82S_Y123H_Q154R |
| ABE8.19-m | TadA*8.19 | Monomer_TadA*7.10 + |
| | | V82S_Y123H_Y147R_Q154R |
| ABE8.20-m | TadA*8.20 | Monomer_TadA*7.10 + |
| | | I76Y_V82S_Y123H_Y147R_Q154R |
| ABE8.21-m | TadA*8.21 | Monomer_TadA*7.10 + Y147R_Q154S |
| ABE8.22-m | TadA*8.22 | Monomer_TadA*7.10 + V82S_Q154S |
| ABE8.23-m | TadA*8.23 | Monomer_TadA*7.10 + V82S_Y123H |
| ABE8.24-m | TadA*8.24 | Monomer_TadA*7.10 + V82S_Y123H_Y147T |
| ABE8.1-d | TadA*8.1 | Heterodimer_(WT) + (TadA*7.10 + Y147T) |
| ABE8.2-d | TadA*8.2 | Heterodimer_(WT) + (TadA*7.10 + Y147R) |
| ABE8.3-d | TadA*8.3 | Heterodimer_(WT) + (TadA*7.10 + Q154S) |
| ABE8.4-d | TadA*8.4 | Heterodimer_(WT) + (TadA*7.10 + Y123H) |
| ABE8.5-d | TadA*8.5 | Heterodimer_(WT) + (TadA*7.10 + V82S) |
| ABE8.6-d | TadA*8.6 | Heterodimer_(WT) + (TadA*7.10 + T166R) |
| ABE8.7-d | TadA*8.7 | Heterodimer_(WT) + (TadA*7.10 + Q154R) |
| ABE8.8-d | TadA*8.8 | Heterodimer_(WT) + (TadA*7.10 + |
| | | Y147R_Q154R_Y123H) |
| ABE8.9-d | TadA*8.9 | Heterodimer_(WT) + (TadA*7.10 + |
| | | Y147R_Q154R_I76Y) |
| ABE8.10-d | TadA*8.10 | Heterodimer_(WT) + (TadA*7.10 + |
| | | Y147R_Q154R_T166R) |
| ABE8.11-d | TadA*8.11 | Heterodimer_(WT) + (TadA*7.10 + Y147T_Q154R) |
| ABE8.12-d | TadA*8.12 | Heterodimer_(WT) + (TadA*7.10 + Y147T_Q154S) |
| ABE8.13-d | TadA*8.13 | Heterodimer_(WT) + (TadA*7.10 + |
| | | Y123H_Y147T_Q154R_I76Y) |
| ABE8.14-d | TadA*8.14 | Heterodimer_(WT) + (TadA*7.10 + 176Y_V82S) |
| ABE8.15-d | TadA*8.15 | Heterodimer_(WT) + (TadA*7.10 + V82S_Y147R) |
| ABE8.16-d | TadA*8.16 | Heterodimer_(WT) + (TadA*7.10 + |
| | | V82S_Y123H_Y147R) |
| ABE8.17-d | TadA*8.17 | Heterodimer_(WT) + (TadA*7.10 + V82S_Q154R) |
| ABE8.18-d | TadA*8.18 | Heterodimer_(WT) + (TadA*7.10 + |
| | | V82S_Y123H_Q154R) |
| ABE8.19-d | TadA*8.19 | Heterodimer_(WT) + (TadA*7.10 + |
| | | V82S_Y123H_Y147R_Q154R) |
| ABE8.20-d | TadA*8.20 | Heterodimer_(WT) + (TadA*7.10 + |
| | | I76Y_V82S_Y123H_Y147R_Q154R) |
| ABE8.21-d | TadA*8.21 | Heterodimer_(WT) + (TadA*7.10 + Y147R_Q154S) |
| ABE8.22-d | TadA*8.22 | Heterodimer_(WT) + (TadA*7.10 + V82S_Q154S) |
| ABE8.23-d | TadA*8.23 | Heterodimer_(WT) + (TadA*7.10 + V82S_Y123H) |
| ABE8.24-d | TadA*8.24 | Heterodimer_(WT) + (TadA*7.10 + |
| | | V82S_Y123H_Y147T) |

[0708] In some embodiments, the ABE8 is ABE8a-m, which has a monomeric construct containing TadA*7.10 with R26C, A109S, T111R, D119N, H122N, Y147D, F149Y, T166I, and D167N mutations (TadA*8a). In some embodiments, the ABE8 is ABE8b-m, which has a monomeric construct containing TadA*7.10 with V88A, A109S, T111R, D119N, H122N, F149Y, T166I, and D167N mutations (TadA*8b). In some embodiments, the ABE8 is ABE8c-m, which has a monomeric construct containing TadA*7.10 with R26C, A109S, T111R, D119N, H122N, F149Y, T166I, and D167N mutations (TadA*8c). In some embodiments, the ABE8 is ABE8d-m, which has a monomeric construct containing TadA*7.10 with V88A, T111R, D119N, and F149Y mutations (TadA*8d). In some embodiments, the ABE8 is ABE8e-m, which has a monomeric construct containing TadA*7.10 with A109S, T111R, D119N, H122N, Y147D, F149Y, T166I, and D167N mutations (TadA*8e).

[0709] In some embodiments, the ABE8 is ABE8a-d, which has a heterodimeric construct containing wild-type E. coli TadA fused to TadA*7.10 with R26C, A109S, T111R, D119, H122N, Y147D, F149Y, T166I, and D167N mutations (TadA*8a). In some embodiments, the ABE8 is ABE8b-d, which has a heterodimeric construct containing wild-type E. coli TadA fused to TadA*7.10 with V88A, A109S, T111R, D119N, H122N, F149Y, T166I, and D167N mutations (TadA*8b). In some embodiments, the ABE8 is ABE8c-d, which has a heterodimeric construct containing wild-type E. coli TadA fused to TadA*7.10 with R26C, A109S, T111R, D119N, H122N, F149Y, T166I, and D167N mutations (TadA*8c). In some embodiments, the ABE8 is ABE8d-d, which has a heterodimeric construct containing wild-type E. coli TadA fused to TadA*7.10 with V88A, T111R, D119N, and F149Y mutations (TadA*8d). In some embodiments, the ABE8 is ABE8e-d, which has a heterodimeric construct containing wild-type E. coli TadA fused to TadA*7.10 with A109S, T111R, D119N, H122N, Y147D, F149Y, T166I, and D167N mutations (TadA*8e).

[0710] In some embodiments, the ABE8 is ABE8a-7, which has a heterodimeric construct containing TadA*7.10 fused to TadA*7.10 with R26C, A109S, T111R, D119, H122N, Y147D, F149Y, T166I, and D167N mutations (TadA*8a). In some embodiments, the ABE8 is ABE8b-7, which has a heterodimeric construct containing TadA*7.10 fused to TadA*7.10 with V88A, A109S, T111R, D119N, H122N, F149Y, T166I, and D167N mutations (TadA*8b). In some embodiments, the ABE8 is ABE8c-7, which has a heterodimeric construct containing TadA*7.10 fused to TadA*7.10 with R26C, A109S, T111R, D119N, H122N, F149Y, T166I, and D167N mutations (TadA*8c). In some embodiments, the ABE8 is ABE8d-7, which has a heterodimeric construct containing TadA*7.10 fused to TadA*7.10 with V88A, T111R, D119N, and F149Y mutations (TadA*8d). In some embodiments, the ABE8 is ABE8e-7, which has a heterodimeric construct containing TadA*7.10 fused to TadA*7.10 with A109S, T111R, D119N, H122N, Y147D, F149Y, T166I, and D167N mutations (TadA*8e).

[0711] In some embodiments, the ABE is ABE8a-m, ABE8b-m, ABE8c-m, ABE8d-m, ABE8e-m, ABE8a-d, ABE8b-d, ABE8c-d, ABE8d-d, or ABE8e-d, as shown in Table 13 below. In some embodiments, the ABE is ABE8e-m or ABE8e-d. ABE8e shows efficient adenine base editing activity and low indel formation when used with Cas homologues other than SpCas9, for example, SaCas9, SaCas9-KKH, Cas12a homologues, e.g., LbCas12a, enAs-Cas12a, SpCas9-NG and circularly permuted CP1028-SpCas9 and CP1041-SpCas9. In addition to the mutations shown for ABE8e in Table 13, off-target RNA and DNA editing were reduced by introducing a V106W substitution into the TadA domain (as described in M. Richter et al., 2020, Nature Biotechnology, doi.org/10.1038/s41587-020-0453-z, the entire contents of which are incorporated by reference herein).

TABLE 13
Additional Adenosine Deaminase Base Editor 8 Variants.

| ABE8 | | |
|---|---|---|
| Base | Adenosine | |
| Editor | Deaminase | Adenosine Deaminase Description |
| ABE8a-m | TadA*8a | Monomer_TadA*7.10 + R26C + A109S + |
| | | T111R + D119N + H122N + Y147D + |
| | | F149Y + T166I + D167N |
| ABE8b-m | TadA*8b | Monomer_TadA*7.10 + V88A + A109S + |
| | | T111R + D119N + H122N + F149Y + |
| | | T166I + D167N |
| ABE8c-m | TadA*8c | Monomer_TadA*7.10 + R26C + A109S + |
| | | T111R + D119N + H122N + F149Y + |
| | | T166I + D167N |
| ABE8d-m | TadA*8d | Monomer_TadA*7.10 + V88A + T111R + |
| | | D119N + F149Y |
| ABE8e-m | TadA*8e | Monomer_TadA*7.10 + A109S + T111R + |
| | | D119N + H122N + Y147D + F149Y + |
| | | T166I + D167N |
| ABE8a-d | TadA*8a | Heterodimer_(WT) + (TadA*7.10 + R26C + |
| | | A109S + T111R + D119N + H122N + |
| | | Y147D + F149Y + T166I + D167N) |
| ABE8b-d | TadA*8b | Heterodimer_(WT) + (TadA*7.10 + V88A + |
| | | A109S + T111R + D119N + H122N + |
| | | F149Y + T166I + D167N) |
| ABE8c-d | TadA*8c | Heterodimer_(WT) + (TadA*7.10 + R26C + |
| | | A109S + T111R + D119N + H122N + |
| | | F149Y + T166I + D167N) |
| ABE8d-d | TadA*8d | Heterodimer_(WT) + (TadA*7.10 + V88A + |
| | | T111R + D119N + F149Y) |
| ABE8e-d | TadA*8e | Heterodimer_(WT) + (TadA*7.10 + A109S + |
| | | T111R + D119N + H122N + Y147D + |
| | | F149Y + T166I + D167N) |

In the table, “monomer” indicates an ABE comprising a single TadA*7.10 comprising the indicated alterations and “heterodimer” indicates an ABE comprising a TadA*7.10 comprising the indicated alterations fused to an E. coli TadA adenosine deaminase.

[0712] In some embodiments, base editors (e.g., ABE8) are generated by cloning an adenosine deaminase variant (e.g., TadA*8) into a scaffold that includes a circular permutant Cas9 (e.g., CP5 or CP6) and a bipartite nuclear localization sequence. In some embodiments, the base editor (e.g., ABE7.9, ABE7.10, or ABE8) is an NGC PAM CP5 variant (S. pyogenes Cas9 or spVRQR Cas9). In some embodiments, the base editor (e.g., ABE7.9, ABE7.10, or ABE8) is an AGA PAM CP5 variant (S. pyogenes Cas9 or spVRQR Cas9). In some embodiments, the base editor (e.g., ABE7.9, ABE7.10, or ABE8) is an NGC PAM CP6 variant (S. pyogenes Cas9 or spVRQR Cas9). In some embodiments, the base editor (e.g. ABE7.9, ABE7.10, or ABE8) is an AGA PAM CP6 variant (S. pyogenes Cas9 or spVRQR Cas9).

[0713] In some embodiments, the ABE has a genotype as shown in Table 14 below.

TABLE 14
Genotypes of ABEs

| | 23 | 26 | 36 | 37 | 48 | 49 | 51 | 72 | 84 | 87 | 105 | 108 | 123 | 125 | 142 | 145 | 147 | 152 | 155 | 156 | 157 | 161 |
|---|---|---|---|---|---|---|---|---|---|---|---|---|---|---|---|---|---|---|---|---|---|---|
| ABE7.9 | L | R | L | N | A | | L | N | F | S | V | N | Y | G | N | C | Y | P | V | F | N | K |
| ABE7.10 | R | R | L | N | A | | L | N | F | S | V | N | Y | G | A | C | Y | P | V | F | N | K |

[0714] As shown in Table 15 below, genotypes of 40 ABE8s are described. Residue positions in the evolved E. coli TadA portion of ABE are indicated. Mutational changes in ABE8 are shown when distinct from ABE7.10 mutations. In some embodiments, the ABE has a genotype of one of the ABEs as shown in Table 15 below.

TABLE 15
Residue Identity in Evolved TadA

| | 23 | 36 | 48 | 51 | 76 | 82 | 84 | 106 | 108 | 123 | 146 | 147 | 152 | 154 | 155 | 156 | 157 | 166 |
|---|---|---|---|---|---|---|---|---|---|---|---|---|---|---|---|---|---|---|
| ABE7.10 | R | L | A | L | I | V | F | V | N | Y | C | Y | P | Q | V | F | N | T |
| ABE8.1-m | | | | | | | | | | | | T | | | | | | |
| ABE8.2-m | | | | | | | | | | | | R | | | | | | |
| ABE8.3-m | | | | | | | | | | | | | | S | | | | |
| ABE8.4-m | | | | | | | | | | H | | | | | | | | |
| ABE8.5-m | | | | | | S | | | | | | | | | | | | |
| ABE8.6-m | | | | | | | | | | | | | | | | | | R |
| ABE8.7-m | | | | | | | | | | | | | | R | | | | |
| ABE8.8-m | | | | | | | | | | H | | R | | R | | | | |
| ABE8.9-m | | | | | Y | | | | | | | R | | R | | | | |
| ABE8.10-m | | | | | | | | | | | | R | | R | | | | R |
| ABE8.11-m | | | | | | | | | | | | T | | R | | | | |
| ABE8.12-m | | | | | | | | | | | | T | | S | | | | |
| ABE8.13-m | | | | | Y | | | | | H | | R | | R | | | | |
| ABE8.14-m | | | | | Y | S | | | | | | | | | | | | |
| ABE8.15-m | | | | | | S | | | | | | R | | | | | | |
| ABE8.16-m | | | | | | S | | | | H | | R | | | | | | |
| ABE8.17-m | | | | | | S | | | | | | | | R | | | | |
| ABE8.18-m | | | | | | S | | | | H | | | | R | | | | |
| ABE8.19-m | | | | | | S | | | | H | | R | | R | | | | |
| ABE8.20-m | | | | | Y | S | | | | H | | R | | R | | | | |
| ABE8.21-m | | | | | | | | | | | | R | | S | | | | |
| ABE8.22-m | | | | | | S | | | | | | | | S | | | | |
| ABE8.23-m | | | | | | S | | | | H | | | | | | | | |
| ABE8.24-m | | | | | | S | | | | H | | T | | | | | | |
| ABE8.1-d | | | | | | | | | | | | T | | | | | | |
| ABE8.2-d | | | | | | | | | | | | R | | | | | | |
| ABE8.3-d | | | | | | | | | | | | | | S | | | | |
| ABE8.4-d | | | | | | | | | | H | | | | | | | | |
| ABE8.5-d | | | | | | S | | | | | | | | | | | | |
| ABE8.6-d | | | | | | | | | | | | | | | | | | R |
| ABE8.7-d | | | | | | | | | | | | | | R | | | | |
| ABE8.8-d | | | | | | | | | | H | | R | | R | | | | |
| ABE8.9-d | | | | | Y | | | | | | | R | | R | | | | |
| ABE8.10-d | | | | | | | | | | | | R | | R | | | | R |
| ABE8.11-d | | | | | | | | | | | | T | | R | | | | |
| ABE8.12-d | | | | | | | | | | | | T | | S | | | | |
| ABE8.13-d | | | | | Y | | | | | H | | R | | R | | | | |
| ABE8.14-d | | | | | Y | S | | | | | | | | | | | | |
| ABE8.15-d | | | | | | S | | | | | | R | | | | | | |
| ABE8.16-d | | | | | | S | | | | H | | R | | | | | | |
| ABE8.17-d | | | | | | S | | | | | | | | R | | | | |
| ABE8.18-d | | | | | | S | | | | H | | | | R | | | | |
| ABE8.19-d | | | | | | S | | | | H | | R | | R | | | | |
| ABE8.20-d | | | | | Y | S | | | | H | | R | | R | | | | |
| ABE8.21-d | | | | | | | | | | | | R | | S | | | | |
| ABE8.22-d | | | | | | S | | | | | | | | S | | | | |
| ABE8.23-d | | | | | | S | | | | H | | | | | | | | |
| ABE8.24-d | | | | | | S | | | | H | | T | | | | | | |

[0715] In some embodiments, the base editor is ABE8.1, which comprises or consists essentially of the following sequence or a fragment thereof having adenosine deaminase activity:

ABE8.1_Y147T_CP5_NGC PAM_monomer
(SEQ ID NO: 331)
MSEVEFSHEYWMRHALTLAKRARDEREVPVGAVLVLNNRVIGEGWNRAIGLHDPTAHAEIMA
LRQGGLVMQNYRLIDATLYVTFEPCVMCAGAMIHSRIGRVVFGVRNAKTGAAGSLMDVLHYP
GMNHRVEITEGILADECAALLCTFFRMPRQVFNAQKKAQSSTDSGGSSGGSSGSETPGTSES
ATPESSGGSSGGSEIGKATAKYFFYSNIMNFFKTEITLANGEIRKRPLIETNGETGEIVWDK
GRDFATVRKVLSMPQVNIVKKTEVQTGGFSKESILPKRNSDKLIARKKDWDPKKYGGFMQPT
VAYSVLVVAKVEKGKSKKLKSVKELLGITIMERSSFEKNPIDFLEAKGYKEVKKDLIIKLPK
YSLFELENGRKRMLASAKFLQKGNELALPSKYVNFLYLASHYEKLKGSPEDNEQKQLFVEQH
KHYLDEIIEQISEFSKRVILADANLDKVLSAYNKHRDKPIREQAENIIHLFTLTNLGAPRAF
KYFDTTIARKEYRSTKEVLDATLIHQSITGLYETRIDLSQLGGDGGSGGSGGSGGSGGSGGS
GGMDKKYSIGLAIGTNSVGWAVITDEYKVPSKKFKVLGNTDRHSIKKNLIGALLFDSGETAE
ATRLKRTARRRYTRRKNRICYLQEIFSNEMAKVDDSFFHRLEESFLVEEDKKHERHPIFGNI
VDEVAYHEKYPTIYHLRKKLVDSTDKADLRLIYLALAHMIKFRGHFLIEGDLNPDNSDVDKL
FIQLVQTYNQLFEENPINASGVDAKAILSARLSKSRRLENLIAQLPGEKKNGLFGNLIALSL
GLTPNFKSNFDLAEDAKLQLSKDTYDDDLDNLLAQIGDQYADLFLAAKNLSDAILLSDILRV
NTEITKAPLSASMIKRYDEHHQDLTLLKALVRQQLPEKYKEIFFDQSKNGYAGYIDGGASQE
EFYKFIKPILEKMDGTEELLVKLNREDLLRKQRTFDNGSIPHQIHLGELHAILRRQEDFYPF
LKDNREKIEKILTFRIPYYVGPLARGNSRFAWMTRKSEETITPWNFEEVVDKGASAQSFIER
MTNFDKNLPNEKVLPKHSLLYEYFTVYNELTKVKYVTEGMRKPAFLSGEQKKAIVDLLFKTN
RKVTVKQLKEDYFKKIECFDSVEISGVEDRFNASLGTYHDLLKIIKDKDFLDNEENEDILED
IVLTLTLFEDREMIEERLKTYAHLFDDKVMKQLKRRRYTGWGRLSRKLINGIRDKQSGKTIL
DFLKSDGFANRNFMQLIHDDSLTFKEDIQKAQVSGQGDSLHEHIANLAGSPAIKKGILQTVK
VVDELVKVMGRHKPENIVIEMARENQTTQKGQKNSRERMKRIEEGIKELGSQILKEHPVENT
QLQNEKLYLYYLQNGRDMYVDQELDINRLSDYDVDHIVPQSFLKDDSIDNKVLTRSDKNRGK
SDNVPSEEVVKKMKNYWRQLLNAKLITQRKFDNLTKAERGGLSELDKAGFIKRQLVETRQIT
KHVAQILDSRMNTKYDENDKLIREVKVITLKSKLVSDFRKDFQFYKVREINNYHHAHDAYLN
AVVGTALIKKYPKLESEFVYGDYKVYDVRKMIAKSEQEGADKRTADGSEFESPKKKRKV

[0716] In the above sequence, the plain text denotes an adenosine deaminase sequence, bold sequence indicates sequence derived from Cas9, the italicized sequence denotes a linker sequence, and the underlined sequence denotes a bipartite nuclear localization sequence. Other ABE8 sequences are provided in the attached sequence listing (SEQ ID NOs: 332-354).

[0717] In some embodiments, the base editor is a ninth generation ABE (ABE9). In some embodiments, the ABE9 contains a TadA*9 variant. ABE9 base editors include an adenosine deaminase variant comprising an amino acid sequence, which contains alterations relative to an ABE 7*10 reference sequence, as described herein. Exemplary ABE9 variants are listed in Table 16. Details of ABE9 base editors are described in International PCT Application No. PCT/2020/049975, which is incorporated herein by reference for its entirety.

TABLE 16
Adenosine Deaminase Base Editor 9 (ABE9) Variants.

| ABE9 Description | Alterations |
|---|---|
| ABE9.1_monomer | E25F, V82S, Y123H, T133K, Y147R, Q154R |
| ABE9.2_monomer | E25F, V82S, Y123H, Y147R, Q154R |
| ABE9.3_monomer | V82S, Y123H, P124W, Y147R, Q154R |
| ABE9.4_monomer | L51W, V82S, Y123H, C146R, Y147R, Q154R |
| ABE9.5_monomer | P54C, V82S, Y123H, Y147R, Q154R |
| ABE9.6_monomer | Y73S, V82S, Y123H, Y147R, Q154R |
| ABE9.7_monomer | N38G, V82T, Y123H, Y147R, Q154R |
| ABE9.8_monomer | R23H, V82S, Y123H, Y147R, Q154R |
| ABE9.9_monomer | R21N, V82S, Y123H, Y147R, Q154R |
| ABE9.10_monomer | V82S, Y123H, Y147R, Q154R, A158K |
| ABE9.11_monomer | N72K, V82S, Y123H, D139L, Y147R, Q154R, |
| ABE9.12_monomer | E25F, V82S, Y123H, D139M, Y147R, Q154R |
| ABE9.13_monomer | M70V, V82S, M94V, Y123H, Y147R, Q154R |
| ABE9.14_monomer | Q71M, V82S, Y123H, Y147R, Q154R |
| ABE9.15_heterodimer | E25F, V82S, Y123H, T133K, Y147R, Q154R |
| ABE9.16_heterodimer | E25F, V82S, Y123H, Y147R, Q154R |
| ABE9.17_heterodimer | V82S, Y123H, P124W, Y147R, Q154R |
| ABE9.18_heterodimer | L51W, V82S, Y123H, C146R, Y147R, Q154R |
| ABE9.19_heterodimer | P54C, V82S, Y123H, Y147R, Q154R |
| ABE9.2_heterodimer | Y73S, V82S, Y123H, Y147R, Q154R |
| ABE9.21_heterodimer | N38G, V82T, Y123H, Y147R, Q154R |
| ABE9.22_heterodimer | R23H, V82S, Y123H, Y147R, Q154R |
| ABE9.23_heterodimer | R21N, V82S, Y123H, Y147R, Q154R |
| ABE9.24_heterodimer | V82S, Y123H, Y147R, Q154R, A158K |
| ABE9.25_heterodimer | N72K, V82S, Y123H, D139L, Y147R, Q154R, |
| ABE9.26_heterodimer | E25F, V82S, Y123H, D139M, Y147R, Q154R |
| ABE9.27_heterodimer | M70V, V82S, M94V, Y123H, Y147R, Q154R |
| ABE9.28_heterodimer | Q71M, V82S, Y123H, Y147R, Q154R |
| ABE9.29_monomer | E25F_I76Y_V82S_Y123H_Y147R_Q154R |
| ABE9.30_monomer | I76Y_V82T_Y123H_Y147R_Q154R |
| ABE9.31_monomer | N38G_I76Y_V82S_Y123H_Y147R_Q154R |
| ABE9.32_monomer | N38G_I76Y_V82T_Y123H_Y147R_Q154R |
| ABE9.33_monomer | R23H_I76Y_V82S_Y123H_Y147R_Q154R |
| ABE9.34_monomer | P54C_I76Y_V82S_Y123H_Y147R_Q154R |
| ABE9.35_monomer | R21N_I76Y_V82S_Y123H_Y147R_Q154R |
| ABE9.36_monomer | I76Y_V82S_Y123H_D138M_Y147R_Q154R |
| ABE9.37_monomer | Y72S_I76Y_V82S_Y123H_Y147R_Q154R |
| ABE9.38_heterodimer | E25F_176Y_V82S_Y123H_Y147R_Q154R |
| ABE9.39_heterodimer | I76Y_V82T_Y123H_Y147R_Q154R |
| ABE9.40_heterodimer | N38G_I76Y_V82S_Y123H_Y147R_Q154R |
| ABE9.41_heterodimer | N38G_I76Y_V82T_Y123H_Y147R_Q154R |
| ABE9.42_heterodimer | R23H_I76Y_V82S_Y123H_Y147R_Q154R |
| ABE9.43_heterodimer | P54C_I76Y_V82S_Y123H_Y147R_Q154R |
| ABE9.44_heterodimer | R21N_I76Y_V82S_Y123H_Y147R_Q154R |
| ABE9.45_heterodimer | I76Y_V82S_Y123H_D138M_Y147R_Q154R |
| ABE9.46_heterodimer | Y72S_I76Y_V82S_Y123H_Y147R_Q154R |
| ABE9.47_monomer | N72K_V82S, Y123H, Y147R, Q154R |
| ABE9.48_monomer | Q71M_V82S, Y123H, Y147R, Q154R |
| ABE9.49_monomer | M70V, V82S, M94V, Y123H, Y147R, Q154R |
| ABE9.50_monomer | V82S, Y123H, T133K, Y147R, Q154R |
| ABE9.51_monomer | V82S, Y123H, T133K, Y147R, Q154R, |
| | A158K |
| ABE9.52_monomer | M70V, Q71M, N72K, V82S, Y123H, Y147R, |
| | Q154R |
| ABE9.53_heterodimer | N72K_V82S, Y123H, Y147R, Q154R |
| ABE9.54_heterodimer | Q71M_V82S, Y123H, Y147R, Q154R |
| ABE9.55_heterodimer | M70V, V82S, M94V, Y123H, Y147R, Q154R |
| ABE9.56_heterodimer | V82S, Y123H, T133K, Y147R, Q154R |
| ABE9.57_heterodimer | V82S, Y123H, T133K, Y147R, Q154R, |
| | A158K |
| ABE9.58_heterodimer | M70V, Q71M, N72K, V82S, Y123H, Y147R, |
| | Q154R |

In the table, “monomer” indicates an ABE comprising a single TadA*7.10 comprising the indicated alterations and “heterodimer” indicates an ABE comprising a TadA*7.10 comprising the indicated alterations fused to an E. coli TadA adenosine deaminase.

[0718] In some embodiments, the base editor comprises a domain comprising all or a portion of a uracil glycosylase inhibitor (UGI). In some embodiments, the base editor comprises a domain comprising all or a portion of a nucleic acid polymerase. In some embodiments, a base editor can comprise as a domain all or a portion of a nucleic acid polymerase (NAP). For example, a base editor can comprise all or a portion of a eukaryotic NAP. In some embodiments, a NAP or portion thereof incorporated into a base editor is a DNA polymerase. In some embodiments, a NAP or portion thereof incorporated into a base editor has translesion polymerase activity. In some embodiments, a NAP or portion thereof incorporated into a base editor is a translesion DNA polymerase. In some embodiments, a NAP or portion thereof incorporated into a base editor is a Rev7, Rev1 complex, polymerase iota, polymerase kappa, or polymerase eta. In some embodiments, a NAP or portion thereof incorporated into a base editor is a eukaryotic polymerase alpha, beta, gamma, delta, epsilon, gamma, eta, iota, kappa, lambda, mu, or nu component. In some embodiments, a NAP or portion thereof incorporated into a base editor comprises an amino acid sequence that is at least 75%, 80%, 85%, 90%, 95%, 96%, 97%, 98%, 99%, or 99.5% identical to a nucleic acid polymerase (e.g., a translesion DNA polymerase). In some embodiments, a nucleic acid polymerase or portion thereof incorporated into a base editor is a translesion DNA polymerase.

[0719] In some embodiments, a domain of the base editor can comprise multiple domains. For example, the base editor comprising a polynucleotide programmable nucleotide binding domain derived from Cas9 can comprise a REC lobe and an NUC lobe corresponding to the REC lobe and NUC lobe of a wild-type or natural Cas9. In another example, the base editor can comprise one or more of a RuvCI domain, BH domain, REC1 domain, REC2 domain, RuvCII domain, L1 domain, HNH domain, L2 domain, RuvCIII domain, WED domain, TOPO domain or CTD domain. In some embodiments, one or more domains of the base editor comprise a mutation (e.g., substitution, insertion, deletion) relative to a wild-type version of a polypeptide comprising the domain. For example, an HNH domain of a polynucleotide programmable DNA binding domain can comprise an H840A substitution. In another example, a RuvCI domain of a polynucleotide programmable DNA binding domain can comprise a D10A substitution.

[0720] Different domains (e.g., adjacent domains) of the base editor disclosed herein can be connected to each other with or without the use of one or more linker domains (e.g., an XTEN linker domain). In some embodiments, a linker domain can be a bond (e.g., covalent bond), chemical group, or a molecule linking two molecules or moieties, e.g., two domains of a fusion protein, such as, for example, a first domain (e.g., Cas9-derived domain) and a second domain (e.g., an adenosine deaminase domain or a cytidine deaminase domain). In some embodiments, a linker is a covalent bond (e.g., a carbon-carbon bond, disulfide bond, carbon-hetero atom bond, etc.). In certain embodiments, a linker is a carbon nitrogen bond of an amide linkage. In certain embodiments, a linker is a cyclic or acyclic, substituted or unsubstituted, branched or unbranched aliphatic or heteroaliphatic linker. In certain embodiments, a linker is polymeric (e.g., polyethylene, polyethylene glycol, polyamide, polyester, etc.). In certain embodiments, a linker comprises a monomer, dimer, or polymer of aminoalkanoic acid. In some embodiments, a linker comprises an aminoalkanoic acid (e.g., glycine, ethanoic acid, alanine, beta-alanine, 3-aminopropanoic acid, 4-aminobutanoic acid, 5-pentanoic acid, etc.). In some embodiments, a linker comprises a monomer, dimer, or polymer of aminohexanoic acid (Ahx). In certain embodiments, a linker is based on a carbocyclic moiety (e.g., cyclopentane, cyclohexane). In other embodiments, a linker comprises a polyethylene glycol moiety (PEG). In certain embodiments, a linker comprises an aryl or heteroaryl moiety. In certain embodiments, the linker is based on a phenyl ring. A linker can include functionalized moieties to facilitate attachment of a nucleophile (e.g., thiol, amino) from the peptide to the linker. Any electrophile can be used as part of the linker. Exemplary electrophiles include, but are not limited to, activated esters, activated amides, Michael acceptors, alkyl halides, aryl halides, acyl halides, and isothiocyanates. In some embodiments, a linker joins a gRNA binding domain of an RNA-programmable nuclease, including a Cas9 nuclease domain, and the catalytic domain of a nucleic acid editing protein. In some embodiments, a linker joins a dCas9 and a second domain (e.g., UGI, etc.).

### Linkers

[0721] In certain embodiments, linkers may be used to link any of the peptides or peptide domains of the invention. The linker may be as simple as a covalent bond, or it may be a polymeric linker many atoms in length. In certain embodiments, the linker is a polypeptide or based on amino acids. In other embodiments, the linker is not peptide-like. In certain embodiments, the linker is a covalent bond (e.g., a carbon-carbon bond, disulfide bond, carbon-heteroatom bond, etc.). In certain embodiments, the linker is a carbon-nitrogen bond of an amide linkage. In certain embodiments, the linker is a cyclic or acyclic, substituted or unsubstituted, branched or unbranched aliphatic or heteroaliphatic linker. In certain embodiments, the linker is polymeric (e.g., polyethylene, polyethylene glycol, polyamide, polyester, etc.). In certain embodiments, the linker comprises a monomer, dimer, or polymer of aminoalkanoic acid. In certain embodiments, the linker comprises an aminoalkanoic acid (e.g., glycine, ethanoic acid, alanine, beta-alanine, 3-aminopropanoic acid, 4-aminobutanoic acid, 5-pentanoic acid, etc.). In certain embodiments, the linker comprises a monomer, dimer, or polymer of aminohexanoic acid (Ahx). In certain embodiments, the linker is based on a carbocyclic moiety (e.g., cyclopentane, cyclohexane). In other embodiments, the linker comprises a polyethylene glycol moiety (PEG). In other embodiments, the linker comprises amino acids. In certain embodiments, the linker comprises a peptide. In certain embodiments, the linker comprises an aryl or heteroaryl moiety. In certain embodiments, the linker is based on a phenyl ring. The linker may include functionalized moieties to facilitate attachment of a nucleophile (e.g., thiol, amino) from the peptide to the linker. Any electrophile may be used as part of the linker. Exemplary electrophiles include, but are not limited to, activated esters, activated amides, Michael acceptors, alkyl halides, aryl halides, acyl halides, and isothiocyanates.

[0722] Typically, a linker is positioned between, or flanked by, two groups, molecules, or other moieties and connected to each one via a covalent bond, thus connecting the two. In some embodiments, a linker is an amino acid or a plurality of amino acids (e.g., a peptide or protein). In some embodiments, a linker is an organic molecule, group, polymer, or chemical moiety. In some embodiments, a linker is 2-100 amino acids in length, for example, 2, 3, 4, 5, 6, 7, 8, 9, 10, 11, 12, 13, 14, 15, 16, 17, 18, 19, 20, 21, 22, 23, 24, 25, 26, 27, 28, 29, 30, 30-35, 35-40, 40-45, 45-50, 50-60, 60-70, 70-80, 80-90, 90-100, 100-150, or 150-200 amino acids in length. In some embodiments, the linker is about 3 to about 104 (e.g., 5, 6, 7, 8, 9, 10, 11, 12, 13, 14, 15, 16, 17, 18, 19, 20, 21, 22, 23, 24, 25, 26, 27, 28, 29, 30, 31, 32, 33, 34, 35, 36, 37, 38, 39, 40, 41, 42, 43, 44, 45, 46, 47, 48, 49, 50, 55, 60, 65, 70, 75, 80, 85, 90, 95, or 100) amino acids in length. Longer or shorter linkers are also contemplated.

[0723] In some embodiments, any of the fusion proteins provided herein, comprise a cytidine or adenosine deaminase and a Cas9 domain that are fused to each other via a linker. Various linker lengths and flexibilities between the cytidine or adenosine deaminase and the Cas9 domain can be employed (e.g., ranging from very flexible linkers of the form (GGGS)n (SEQ ID NO: 246), (GGGGS)n (SEQ ID NO: 247), and (G)n to more rigid linkers of the form (EAAAK)n (SEQ ID NO: 248), (SGGS)n (SEQ ID NO: 355), SGSETPGTSESATPES (SEQ ID NO: 249) (see, e.g., Guilinger J P, et al. Fusion of catalytically inactive Cas9 to FokI nuclease improves the specificity of genome modification. Nat. Biotechnol. 2014; 32(6): 577-82; the entire contents are incorporated herein by reference) and (XP)n) in order to achieve the optimal length for activity for the cytidine or adenosine deaminase nucleobase editor. In some embodiments, n is 1, 2, 3, 4, 5, 6, 7, 8, 9, 10, 11, 12, 13, 14, or 15. In some embodiments, the linker comprises a (GGS)n motif, wherein n is 1, 3, or 7. In some embodiments, cytidine deaminase or adenosine deaminase and the Cas9 domain of any of the fusion proteins provided herein are fused via a linker comprising the amino acid sequence SGSETPGTSESATPES (SEQ ID NO: 249), which can also be referred to as the XTEN linker.

[0724] In some embodiments, the domains of the base editor are fused via a linker that comprises the amino acid sequence of:

(SEQ ID NO: 356)
SGGSSGSETPGTSESATPESSGGS,
(SEQ ID NO: 357)
SGGSSGGSSGSETPGTSESATPESSGGSSGGS,
or
(SEQ ID NO: 358)
GGSGGSPGSPAGSPTSTEEGTSESATPESGPGTSTEPSEGSAPGSPAGS
PTSTEEGTSTEPSEGSAPGTSTEPSEGSAPGTSESATPESGPGSEPATS
GGSGGS.

[0725] In some embodiments, domains of the base editor are fused via a linker comprising the amino acid sequence SGSETPGTSESATPES (SEQ ID NO: 249), which may also be referred to as the XTEN linker. In some embodiments, a linker comprises the amino acid sequence SGGS. In some embodiments, the linker is 24 amino acids in length. In some embodiments, the linker comprises the amino acid sequence SGGSSGGSSGSETPGTSESATPES (SEQ ID NO: 359). In some embodiments, the linker is 40 amino acids in length. In some embodiments, the linker comprises the amino acid sequence: SGGSSGGSSGSETPGTSESATPESSGGSSGGSSGGSSGGS (SEQ ID NO: 360). In some embodiments, the linker is 64 amino acids in length. In some embodiments, the linker comprises the amino acid sequence: SGGSSGGSSGSETPGTSESATPESSGGSSGGSSGGSSGGSSGSETPGTSESATPESSGGSSG GS (SEQ ID NO: 361). In some embodiments, the linker is 92 amino acids in length. In some embodiments, the linker comprises the amino acid sequence:

(SEQ ID NO: 362)
PGSPAGSPTSTEEGTSESATPESGPGTSTEPSEGSAPGSPAGSPTSTEE
GTSTEPSEGSAPGTSTEPSEGSAPGTSESATPESGPGSEPATS.

[0726] In some embodiments, a linker comprises a plurality of proline residues and is 5-21, 5-14, 5-9, 5-7 amino acids in length, e.g., PAPAP (SEQ ID NO: 363), PAPAPA (SEQ ID NO: 364), PAPAPAP (SEQ ID NO: 365), PAPAPAPA (SEQ ID NO: 366), P(AP)₄ (SEQ ID NO: 367), P(AP)₇ (SEQ ID NO: 368), P(AP)₁₀ (SEQ ID NO: 369) (see, e.g., Tan J, Zhang F, Karcher D, Bock R. Engineering of high-precision base editors for site-specific single nucleotide replacement. Nat Commun. 2019 Jan. 25; 10(1):439; the entire contents are incorporated herein by reference). Such proline-rich linkers are also termed “rigid” linkers.

[0727] In another embodiment, the base editor system comprises a component (protein) that interacts non-covalently with a deaminase (DNA deaminase), e.g., an adenosine or a cytidine deaminase, and transiently attracts the adenosine or cytidine deaminase to the target nucleobase in a target polynucleotide sequence for specific editing, with minimal or reduced bystander or target-adjacent effects. Such anon-covalent system and method involving deaminase-interacting proteins serves to attract a DNA deaminase to a particular genomic target nucleobase and decouples the events of on-target and target-adjacent editing, thus enhancing the achievement of more precise single base substitution mutations. In an embodiment, the deaminase-interacting protein binds to the deaminase (e.g., adenosine deaminase or cytidine deaminase) without blocking or interfering with the active (catalytic) site of the deaminase from engaging the target nucleobase (e.g., adenosine or cytidine, respectively). Such as system, termed “MagnEdit,” involves interacting proteins tethered to a Cas9 and gRNA complex and can attract a co-expressed adenosine or cytidine deaminase (either exogenous or endogenous) to edit a specific genomic target site, and is described in McCann, J. et al., 2020, “MagnEdit—interacting factors that recruit DNA-editing enzymes to single base targets,” Life-Science-Alliance, Vol. 3, No. 4 (e201900606), (doi 10.26508/Isa.201900606), the contents of which are incorporated by reference herein in their entirety. In an embodiment, the DNA deaminase is an adenosine deaminase variant (e.g., TadA*8) as described herein.

[0728] In another embodiment, a system called “Suntag,” involves non-covalently interacting components used for recruiting protein (e.g., adenosine deaminase or cytidine deaminase) components, or multiple copies thereof, of base editors to polynucleotide target sites to achieve base editing at the site with reduced adjacent target editing, for example, as described in Tanenbaum, M. E. et al., “A protein tagging system for signal amplification in gene expression and fluorescence imaging,” Cell. 2014 Oct. 23; 159(3): 635-646. doi:10.1016/j.cell.2014.09.039; and in Huang, Y.-H. et al., 2017, “DNA epigenome editing using CRISPR-Cas SunTag-directed DNMT3A,” Genome Biol 18: 176. doi:10.1186/s13059-017-1306-z, the contents of each of which are incorporated by reference herein in their entirety. In an embodiment, the DNA deaminase is an adenosine deaminase variant (e.g., TadA*8) as described herein.

Nucleic Acid Programable DNA Binding Proteins with Guide RNAs

[0729] Provided herein are compositions and methods for base editing in cells. Further provided herein are compositions comprising a guide polynucleic acid sequence, e.g. a guide RNA sequence, or a combination of 2, 3, 4, 5, 6, 7, 8, 9, 10, 11, 12, 13, 14, 15, 16, 17, 18, 19, 20, or more guide RNAs as provided herein. In some embodiments, a composition for base editing as provided herein further comprises a polynucleotide that encodes a base editor, e.g. a C-base editor or an A-base editor. For example, a composition for base editing may comprise a mRNA sequence encoding a BE, a BE4, an ABE, and a combination of one or more guide RNAs as provided. A composition for base editing may comprise a base editor polypeptide and a combination of one or more of any guide RNAs provided herein. Such a composition may be used to effect base editing in a cell through different delivery approaches, for example, electroporation, nucleofection, viral transduction or transfection. In some embodiments, the composition for base editing comprises an mRNA sequence that encodes a base editor and a combination of one or more guide RNA sequences provided herein for electroporation.

[0730] Some aspects of this disclosure provide complexes comprising any of the fusion proteins provided herein, and a guide RNA bound to a nucleic acid programmable DNA binding protein (napDNAbp) domain (e.g., a Cas9 (e.g., a dCas9, a nuclease active Cas9, or a Cas9 nickase) or Cas12) of the fusion protein. These complexes are also termed ribonucleoproteins (RNPs). In some embodiments, the guide nucleic acid (e.g., guide RNA) is from 15-100 nucleotides long and comprises a sequence of at least 10 contiguous nucleotides that is complementary to a target sequence. In some embodiments, the guide RNA is 15, 16, 17, 18, 19, 20, 21, 22, 23, 24, 25, 26, 27, 28, 29, 30, 31, 32, 33, 34, 35, 36, 37, 38, 39, 40, 41, 42, 43, 44, 45, 46, 47, 48, 49, or 50 nucleotides long. In some embodiments, the guide RNA comprises a sequence of 15, 16, 17, 18, 19, 20, 21, 22, 23, 24, 25, 26, 27, 28, 29, 30, 31, 32, 33, 34, 35, 36, 37, 38, 39, or 40 contiguous nucleotides that is complementary to a target sequence. In some embodiments, the target sequence is a DNA sequence. In some embodiments, the target sequence is an RNA sequence. In some embodiments, the target sequence is a sequence in the genome of a bacteria, yeast, fungi, insect, plant, or animal. In some embodiments, the target sequence is a sequence in the genome of a human. In some embodiments, the 3′ end of the target sequence is immediately adjacent to a canonical PAM sequence (NGG). In some embodiments, the 3′ end of the target sequence is immediately adjacent to a non-canonical PAM sequence (e.g., a sequence listed in Table 7 or 5′-NAA-3′). In some embodiments, the guide nucleic acid (e.g., guide RNA) is complementary to a sequence in a gene of interest (e.g., a gene associated with a disease or disorder).

[0731] Some aspects of this disclosure provide methods of using the fusion proteins, or complexes provided herein. For example, some aspects of this disclosure provide methods comprising contacting a DNA molecule with any of the fusion proteins provided herein, and with at least one guide RNA, wherein the guide RNA is about 15-100 nucleotides long and comprises a sequence of at least 10 contiguous nucleotides that is complementary to a target sequence. In some embodiments, the 3′ end of the target sequence is immediately adjacent to an AGC, GAG, TTT, GTG, or CAA sequence. In some embodiments, the 3′ end of the target sequence is immediately adjacent to an NGA, NGCG, NGN, NNGRRT, NNNRRT, NGCG, NGCN, NGTN, NGTN, NGTN, or 5′ (TTTV) sequence. In some embodiments, the 3′ end of the target sequence is immediately adjacent to an e.g., TTN, DTTN, GTTN, ATTN, ATTC, DTTNT, WTTN, HATY, TTTN, TTTV, TTTC, TG, RTR, or YTN PAM site.

[0732] It will be understood that the numbering of the specific positions or residues in the respective sequences depends on the particular protein and numbering scheme used. Numbering might differ, e.g., in precursors of a mature protein and the mature protein itself, and differences in sequences from species to species may affect numbering. One of skill in the art will be able to identify the respective residue in any homologous protein and in the respective encoding nucleic acid by methods well known in the art, e.g., by sequence alignment and determination of homologous residues.

[0733] It will be apparent to those of skill in the art that in order to target any of the fusion proteins disclosed herein, to a target site, e.g., a site comprising a mutation to be edited, it is typically necessary to co-express the fusion protein together with a guide RNA. As explained in more detail elsewhere herein, a guide RNA typically comprises a tracrRNA framework allowing for napDNAbp (e.g., Cas9 or Cas12) binding, and a guide sequence, which confers sequence specificity to the napDNAbp:nucleic acid editing enzyme/domain fusion protein. Alternatively, the guide RNA and tracrRNA may be provided separately, as two nucleic acid molecules. In some embodiments, the guide RNA comprises a structure, wherein the guide sequence comprises a sequence that is complementary to the target sequence. The guide sequence is typically 20 nucleotides long. The sequences of suitable guide RNAs for targeting napDNAbp:nucleic acid editing enzyme/domain fusion proteins to specific genomic target sites will be apparent to those of skill in the art based on the instant disclosure. Such suitable guide RNA sequences typically comprise guide sequences that are complementary to a nucleic sequence within 50 nucleotides upstream or downstream of the target nucleotide to be edited. Some exemplary guide RNA sequences suitable for targeting any of the provided fusion proteins to specific target sequences are provided herein.

[0734] Distinct portions of sgRNA are predicted to form various features that interact with Cas9 (e.g., SpyCas9) and/or the DNA target. Six conserved modules have been identified within native crRNA:tracrRNA duplexes and single guide RNAs (sgRNAs) that direct Cas9 endonuclease activity (see Briner et al., Guide RNA Functional Modules Direct Cas9 Activity and Orthogonality Mol Cell. 2014 Oct. 23; 56(2):333-339). The six modules include the spacer responsible for DNA targeting, the upper stem, bulge, lower stem formed by the CRISPR repeat:tracrRNA duplex, the nexus, and hairpins from the 3′ end of the tracrRNA. The upper and lower stems interact with Cas9 mainly through sequence-independent interactions with the phosphate backbone. In some embodiments, the upper stem is dispensable. In some embodiments, the conserved uracil nucleotide sequence at the base of the lower stem is dispensable. The bulge participates in specific side-chain interactions with the Rec1 domain of Cas9. The nucleobase of U44 interacts with the side chains of Tyr 325 and His 328, while G43 interacts with Tyr 329. The nexus forms the core of the sgRNA:Cas9 interactions and lies at the intersection between the sgRNA and both Cas9 and the target DNA. The nucleobases of A51 and A52 interact with the side chain of Phe 1105; U56 interacts with Arg 457 and Asn 459; the nucleobase of U59 inserts into a hydrophobic pocket defined by side chains of Arg 74, Asn 77, Pro 475, Leu 455, Phe 446, and Ile 448; C60 interacts with Leu 455, Ala 456, and Asn 459, and C61 interacts with the side chain of Arg 70, which in turn interacts with C15. In some embodiments, one or more of these mutations are made in the bulge and/or the nexus of a sgRNA for a Cas9 (e.g., spyCas9) to optimize sgRNA:Cas9 interactions.

[0735] Moreover, the tracrRNA nexus and hairpins are critical for Cas9 pairing and can be swapped to cross orthogonality barriers separating disparate Cas9 proteins, which is instrumental for further harnessing of orthogonal Cas9 proteins. In some embodiments, the nexus and hairpins are swapped to target orthogonal Cas9 proteins. In some embodiments, a sgRNA is dispensed of the upper stem, hairpin 1, and/or the sequence flexibility of the lower stem to design a guide RNA that is more compact and conformationally stable. In some embodiments, the modules are modified to optimize multiplex editing using a single Cas9 with various chimeric guides or by concurrently using orthogonal systems with different combinations of chimeric sgRNAs. Details regarding guide functional modules and methods thereof are described, for example, in Briner et al., Guide RNA Functional Modules Direct Cas9 Activity and Orthogonality Mol Cell. 2014 Oct. 23; 56(2):333-339, the contents of which is incorporated by reference herein in its entirety.

[0736] The domains of the base editor disclosed herein can be arranged in any order. Non-limiting examples of a base editor comprising a fusion protein comprising e.g., a polynucleotide-programmable nucleotide-binding domain (e.g., Cas9 or Cas12) and a deaminase domain (e.g., cytidine or adenosine deaminase) can be arranged as follows:
[0737] NH2-[nucleobase editing domain]-Linker1-[nucleobase editing domain]-COOH;
[0738] NH2-[deaminase]-Linker1-[nucleobase editing domain]-COOH;
[0739] NH2-[deaminase]-Linker1-[nucleobase editing domain]-Linker2-[UGI]-COOH;
[0740] NH2-[deaminase]-Linker1-[nucleobase editing domain]-COOH;
[0741] NH2-[adenosine deaminase]-Linker1-[nucleobase editing domain]-COOH;
[0742] NH2-[nucleobase editing domain]-[deaminase]-COOH;
[0743] NH2-[deaminase]-[nucleobase editing domain]-[inosine BER inhibitor]-COOH;
[0744] NH2-[deaminase]-[inosine BER inhibitor]-[nucleobase editing domain]-COOH;
[0745] NH2-[inosine BER inhibitor]-[deaminase]-[nucleobase editing domain]-COOH;
[0746] NH2-[nucleobase editing domain]-[deaminase]-[inosine BER inhibitor]-COOH;
[0747] NH2-[nucleobase editing domain]-[inosine BER inhibitor]-[deaminase]-COOH;
[0748] NH2-[inosine BER inhibitor]-[nucleobase editing domain]-[deaminase]-COOH;
[0749] NH2-[nucleobase editing domain]-Linker1-[deaminase]-Linker2-[nucleobase editing domain]-COOH;
[0750] NH2-[nucleobase editing domain]-Linker1-[deaminase]-[nucleobase editing domain]-COOH;
[0751] NH2-[nucleobase editing domain]-[deaminase]-Linker2-[nucleobase editing domain]-COOH;
[0752] NH2-[nucleobase editing domain]-[deaminase]-[nucleobase editing domain]-COOH;
[0753] NH2-[nucleobase editing domain]-Linker1-[deaminase]-Linker2-[nucleobase editing domain]-[inosine BER inhibitor]-COOH;
[0754] NH2-[nucleobase editing domain]-Linker1-[deaminase]-[nucleobase editing domain]-[inosine BER inhibitor]-COOH;
[0755] NH2-[nucleobase editing domain]-[deaminase]-Linker2-[nucleobase editing domain]-[inosine BER inhibitor]-COOH;
[0756] NH2-[nucleobase editing domain]-[deaminase]-[nucleobase editing domain]-[inosine BER inhibitor]-COOH;
[0757] NH2-[inosine BER inhibitor]-[nucleobase editing domain]-Linker1-[deaminase]-Linker2-[nucleobase editing domain]-COOH;
[0758] NH2-[inosine BER inhibitor]-[nucleobase editing domain]-Linker1-[deaminase]-[nucleobase editing domain]-COOH;
[0759] NH2-[inosine BER inhibitor]-[nucleobase editing domain]-[deaminase]-Linker2-[nucleobase editing domain]-COOH; or
[0760] NH2-[inosine BER inhibitor]NH₂-[nucleobase editing domain]-[deaminase]-[nucleobase editing domain]-COOH.

[0761] In some embodiments, the base editing fusion proteins provided herein need to be positioned at a precise location, for example, where a target base is placed within a defined region (e.g., a “deamination window”). In some embodiments, a target can be within a 4-base region. In some embodiments, such a defined target region can be approximately 15 bases upstream of the PAM. See Komor, A. C., et al., “Programmable editing of a target base in genomic DNA without double-stranded DNA cleavage” Nature 533, 420-424 (2016); Gaudelli, N. M., et al., “Programmable base editing of A·T to G·C in genomic DNA without DNA cleavage” Nature 551, 464-471 (2017); and Komor, A. C., et al., “Improved base excision repair inhibition and bacteriophage Mu Gam protein yields C:G-to-T:A base editors with higher efficiency and product purity” Science Advances 3:eaao4774 (2017), the entire contents of which are hereby incorporated by reference.

[0762] A defined target region can be a deamination window. A deamination window can be the defined region in which a base editor acts upon and deaminates a target nucleotide. In some embodiments, the deamination window is within a 2, 3, 4, 5, 6, 7, 8, 9, or 10 base regions. In some embodiments, the deamination window is 5, 6, 7, 8, 9, 10, 11, 12, 13, 14, 15, 16, 17, 18, 19, 20, 21, 22, 23, 24, or 25 bases upstream of the PAM.

[0763] The base editors of the present disclosure can comprise any domain, feature or amino acid sequence which facilitates the editing of a target polynucleotide sequence. For example, in some embodiments, the base editor comprises a nuclear localization sequence (NLS). In some embodiments, an NLS of the base editor is localized between a deaminase domain and a napDNAbp domain. In some embodiments, an NLS of the base editor is localized C-terminal to a napDNAbp domain.

[0764] Non-limiting examples of protein domains which can be included in the fusion protein include a deaminase domain (e.g., adenosine deaminase or cytidine deaminase), a uracil glycosylase inhibitor (UGI) domain, epitope tags, reporter gene sequences, and/or protein domains having one or more of the activities described herein.

[0765] A domain may be detected or labeled with an epitope tag, a reporter protein, other binding domains. Non-limiting examples of epitope tags include histidine (His) tags, V5 tags, FLAG tags, influenza hemagglutinin (HA) tags, Myc tags, VSV-G tags, and thioredoxin (Trx) tags. Examples of reporter genes include, but are not limited to, glutathione-5-transferase (GST), horseradish peroxidase (HRP), chloramphenicol acetyltransferase (CAT) beta-galactosidase, beta-glucuronidase, luciferase, green fluorescent protein (GFP), HcRed, DsRed, cyan fluorescent protein (CFP), yellow fluorescent protein (YFP), and autofluorescent proteins including blue fluorescent protein (BFP). Additional protein sequences can include amino acid sequences that bind DNA molecules or bind other cellular molecules, including but not limited to maltose binding protein (MBP), S-tag, Lex A DNA binding domain (DBD) fusions, GAL4 DNA binding domain fusions, and herpes simplex virus (HSV) BP16 protein fusions.

### Methods of Using Fusion Proteins Comprising a Cytidine or Adenosine Deaminase and a Cas9 Domain

[0766] Some aspects of this disclosure provide methods of using the fusion proteins, or complexes provided herein. For example, some aspects of this disclosure provide methods comprising contacting a DNA molecule with any of the fusion proteins provided herein, and with at least one guide RNA described herein.

[0767] In some embodiments, a fusion protein of the invention is used for editing a target gene of interest. In particular, a cytidine deaminase or adenosine deaminase nucleobase editor described herein is capable of making multiple mutations within a target sequence. These mutations may affect the function of the target. For example, when a cytidine deaminase or adenosine deaminase nucleobase editor is used to target a regulatory region the function of the regulatory region is altered and the expression of the downstream protein is reduced or eliminated.

[0768] It will be understood that the numbering of the specific positions or residues in the respective sequences depends on the particular protein and numbering scheme used. Numbering might be different, e.g., in precursors of a mature protein and the mature protein itself, and differences in sequences from species to species may affect numbering. One of skill in the art will be able to identify the respective residue in any homologous protein and in the respective encoding nucleic acid by methods well known in the art, e.g., by sequence alignment and determination of homologous residues.

[0769] It will be apparent to those of skill in the art that in order to target any of the fusion proteins comprising a Cas9 domain and a cytidine or adenosine deaminase, as disclosed herein, to a target site, e.g., a site comprising a mutation to be edited, it is typically necessary to co-express the fusion protein together with a guide RNA, e.g., an sgRNA. As explained in more detail elsewhere herein, a guide RNA typically comprises a tracrRNA framework allowing for Cas9 binding, and a guide sequence, which confers sequence specificity to the Cas9:nucleic acid editing enzyme/domain fusion protein. Alternatively, the guide RNA and tracrRNA may be provided separately, as two nucleic acid molecules. In some embodiments, the guide RNA comprises a structure, wherein the guide sequence comprises a sequence that is complementary to the target sequence. The guide sequence is typically 20 nucleotides long. The sequences of suitable guide RNAs for targeting Cas9:nucleic acid editing enzyme/domain fusion proteins to specific genomic target sites will be apparent to those of skill in the art based on the instant disclosure. Such suitable guide RNA sequences typically comprise guide sequences that are complementary to a nucleic sequence within 50 nucleotides upstream or downstream of the target nucleotide to be edited. Some exemplary guide RNA sequences suitable for targeting any of the provided fusion proteins to specific target sequences are provided herein.

### Base Editor Efficiency

[0770] In some embodiments, the purpose of the methods provided herein is to alter a gene and/or gene product via gene editing. The nucleobase editing proteins provided herein can be used for gene editing-based human therapeutics in vitro or in vivo. It will be understood by the skilled artisan that the nucleobase editing proteins provided herein, e.g., the fusion proteins comprising a polynucleotide programmable nucleotide binding domain (e.g., Cas9) and a nucleobase editing domain (e.g., an adenosine deaminase domain or a cytidine deaminase domain) can be used to edit a nucleotide from A to G or C to T.

[0771] Advantageously, base editing systems as provided herein provide genome editing without generating double-strand DNA breaks, without requiring a donor DNA template, and without inducing an excess of stochastic insertions and deletions as CRISPR may do. In some embodiments, the present disclosure provides base editors that efficiently generate an intended mutation, such as a STOP codon, in a nucleic acid (e.g., a nucleic acid within a genome of a subject) without generating a significant number of unintended mutations, such as unintended point mutations. In some embodiments, an intended mutation is a mutation that is generated by a specific base editor (e.g., adenosine base editor or cytidine base editor) bound to a guide polynucleotide (e.g., gRNA), specifically designed to generate the intended mutation. In some embodiments, the intended mutation is in a gene associated with a target antigen associated with a disease or disorder, e.g., HBV infection, as well as related diseases and disorders, including cirrhosis, hepatocellular carcinoma (HCC), and any other disease associated with or resulting from HBV infection. In some embodiments, the intended mutation is an adenine (A) to guanine (G) point mutation (e.g., SNP) in a gene associated with a target antigen associated with a disease or disorder, e.g. HBV infection, as well as related diseases and disorders, including cirrhosis, hepatocellular carcinoma (HCC), and any other disease associated with or resulting from HBV infection. In some embodiments, the intended mutation is an adenine (A) to guanine (G) point mutation within the coding region or non-coding region of a gene (e.g., regulatory region or element). In some embodiments, the intended mutation is a cytosine (C) to thymine (T) point mutation (e.g., SNP) in a gene associated with a target antigen associated with a disease or disorder, e.g. HBV infection, as well as related diseases and disorders, including cirrhosis, hepatocellular carcinoma (HCC), and any other disease associated with or resulting from HBV infection. In some embodiments, the intended mutation is a cytosine (C) to thymine (T) point mutation within the coding region or non-coding region of a gene (e.g., regulatory region or element). In some embodiments, the intended mutation is a point mutation that generates a STOP codon, for example, a premature STOP codon within the coding region of a gene. In some embodiments, the intended mutation is a mutation that eliminates a stop codon.

[0772] The base editors of the invention advantageously modify a specific nucleotide base encoding a protein without generating a significant proportion of indels. An “indel”, as used herein, refers to the insertion or deletion of a nucleotide base within a nucleic acid. Such insertions or deletions can lead to frame shift mutations within a coding region of a gene. In some embodiments, it is desirable to generate base editors that efficiently modify (e.g. mutate) a specific nucleotide within a nucleic acid, without generating a large number of insertions or deletions (i.e., indels) in the nucleic acid. In some embodiments, it is desirable to generate base editors that efficiently modify (e.g. mutate or methylate) a specific nucleotide within a nucleic acid, without generating a large number of insertions or deletions (i.e., indels) in the nucleic acid. In certain embodiments, any of the base editors provided herein can generate a greater proportion of intended modifications (e.g., methylations) versus indels. In certain embodiments, any of the base editors provided herein can generate a greater proportion of intended modifications (e.g., mutations) versus indels.

[0773] In some embodiments, the base editors provided herein are capable of generating a ratio of intended mutations to indels (i.e., intended point mutations:unintended point mutations) that is greater than 1:1. In some embodiments, the base editors provided herein are capable of generating a ratio of intended mutations to indels that is at least 1.5:1, at least 2:1, at least 2.5:1, at least 3:1, at least 3.5:1, at least 4:1, at least 4.5:1, at least 5:1, at least 5.5:1, at least 6:1, at least 6.5:1, at least 7:1, at least 7.5:1, at least 8:1, at least 10:1, at least 12:1, at least 15:1, at least 20:1, at least 25:1, at least 30:1, at least 40:1, at least 50:1, at least 100:1, at least 200:1, at least 300:1, at least 400:1, at least 500:1, at least 600:1, at least 700:1, at least 800:1, at least 900:1, or at least 1000:1, or more. The number of intended mutations and indels may be determined using any suitable method.

[0774] In some embodiments, the base editors provided herein can limit formation of indels in a region of a nucleic acid. In some embodiments, the region is at a nucleotide targeted by a base editor or a region within 2, 3, 4, 5, 6, 7, 8, 9, or 10 nucleotides of a nucleotide targeted by a base editor. In some embodiments, any of the base editors provided herein can limit the formation of indels at a region of a nucleic acid to less than 1%, less than 1.5%, less than 2%, less than 2.5%, less than 3%, less than 3.5%, less than 4%, less than 4.5%, less than 5%, less than 6%, less than 7%, less than 8%, less than 9%, less than 10%, less than 12%, less than 15%, or less than 20%. The number of indels formed at a nucleic acid region may depend on the amount of time a nucleic acid (e.g., a nucleic acid within the genome of a cell) is exposed to a base editor. In some embodiments, a number or proportion of indels is determined after at least 1 hour, at least 2 hours, at least 6 hours, at least 12 hours, at least 24 hours, at least 36 hours, at least 48 hours, at least 3 days, at least 4 days, at least 5 days, at least 7 days, at least 10 days, or at least 14 days of exposing a nucleic acid (e.g., a nucleic acid within the genome of a cell) to a base editor.

[0775] Some aspects of the disclosure are based on the recognition that any of the base editors provided herein are capable of efficiently generating an intended mutation in a nucleic acid (e.g. a nucleic acid within a genome of a subject) without generating a considerable number of unintended mutations (e.g., spurious off-target editing or bystander editing). In some embodiments, an intended mutation is a mutation that is generated by a specific base editor bound to a gRNA, specifically designed to generate the intended mutation. In some embodiments, the intended mutation is a mutation that generates a stop codon, for example, a premature stop codon within the coding region of a gene. In some embodiments, the intended mutation is a mutation that eliminates a stop codon. In some embodiments, the intended mutation is a mutation that alters the splicing of a gene. In some embodiments, the intended mutation is a mutation that alters the regulatory sequence of a gene (e.g., a gene promotor or gene repressor). In some embodiments, any of the base editors provided herein are capable of generating a ratio of intended mutations to unintended mutations (e.g., intended mutations:unintended mutations) that is greater than 1:1. In some embodiments, any of the base editors provided herein are capable of generating a ratio of intended mutations to unintended mutations that is at least 1.5:1, at least 2:1, at least 2.5:1, at least 3:1, at least 3.5:1, at least 4:1, at least 4.5:1, at least 5:1, at least 5.5:1, at least 6:1, at least 6.5:1, at least 7:1, at least 7.5:1, at least 8:1, at least 10:1, at least 12:1, at least 15:1, at least 20:1, at least 25:1, at least 30:1, at least 40:1, at least 50:1, at least 100:1, at least 150:1, at least 200:1, at least 250:1, at least 500:1, or at least 1000:1, or more. It should be appreciated that the characteristics of the base editors described herein may be applied to any of the fusion proteins, or methods of using the fusion proteins provided herein.

[0776] Base editing is often referred to as a “modification”, such as, a genetic modification, a gene modification and modification of the nucleic acid sequence and is clearly understandable based on the context that the modification is a base editing modification. A base editing modification is therefore a modification at the nucleotide base level, for example as a result of the deaminase activity discussed throughout the disclosure, which then results in a change in the gene sequence, and may affect the gene product. In essence therefore, the gene editing modification described herein may result in a modification of the gene, structurally and/or functionally, wherein the expression of the gene product may be modified, for example, the expression of the gene is knocked out; or conversely, enhanced, or, in some circumstances, the gene function or activity may be modified. Using the methods disclosed herein, a base editing efficiency may be determined as the knockdown efficiency of the gene in which the base editing is performed, wherein the base editing is intended to knockdown the expression of the gene. A knockdown level may be validated quantitatively by determining the expression level by any detection assay, such as assay for protein expression level, for example, by flow cytometry; assay for detecting RNA expression such as quantitative RT-PCR, northern blot analysis, or any other suitable assay such as pyrosequencing; and may be validated qualitatively by nucleotide sequencing reactions.

[0777] In some embodiments, the modification, e.g., single base edit results in at least 10% reduction of the gene targeted expression. In some embodiments, the base editing efficiency may result in at least 10% reduction of the gene targeted expression. In some embodiments, the base editing efficiency may result in at least 20% reduction of the gene targeted expression. In some embodiments, the base editing efficiency may result in at least 30% reduction of the gene targeted expression. In some embodiments, the base editing efficiency may result in at least 40% reduction of the gene targeted expression. In some embodiments, the base editing efficiency may result in at least 50% reduction of the gene targeted expression. In some embodiments, the base editing efficiency may result in at least 60% reduction of the targeted gene expression. In some embodiments, the base editing efficiency may result in at least 70% reduction of the targeted gene expression. In some embodiments, the base editing efficiency may result in at least 80% reduction of the targeted gene expression. In some embodiments, the base editing efficiency may result in at least 90% reduction of the targeted gene expression. In some embodiments, the base editing efficiency may result in at least 91% reduction of the targeted gene expression. In some embodiments, the base editing efficiency may result in at least 92% reduction of the targeted gene expression. In some embodiments, the base editing efficiency may result in at least 93% reduction of the targeted gene expression. In some embodiments, the base editing efficiency may result in at least 94% reduction of the targeted gene expression. In some embodiments, the base editing efficiency may result in at least 95% reduction of the targeted gene expression. In some embodiments, the base editing efficiency may result in at least 96% reduction of the targeted gene expression. In some embodiments, the base editing efficiency may result in at least 97% reduction of the targeted gene expression. In some embodiments, the base editing efficiency may result in at least 98% reduction of the targeted gene expression. In some embodiments, the base editing efficiency may result in at least 99% reduction of the targeted gene expression. In some embodiments, the base editing efficiency may result in knockout (100% knockdown of the gene expression) of the gene that is targeted.

[0778] In some embodiments, any of base editor systems provided herein result in less than 50%, less than 40%, less than 30%, less than 20%, less than 19%, less than 18%, less than 17%, less than 16%, less than 15%, less than 14%, less than 13%, less than 12%, less than 11%, less than 10%, less than 9%, less than 8%, less than 7%, less than 6%, less than 5%, less than 4%, less than 3%, less than 2%, less than 1%, less than 0.9%, less than 0.8%, less than 0.7%, less than 0.6%, less than 0.5%, less than 0.4%, less than 0.3%, less than 0.2%, less than 0.1%, less than 0.09%, less than 0.08%, less than 0.07%, less than 0.06%, less than 0.05%, less than 0.04%, less than 0.03%, less than 0.02%, or less than 0.01% indel formation in the target polynucleotide sequence.

[0779] In some embodiments, targeted modifications, e.g., single base editing, are used simultaneously to target at least 4, 5, 6, 7, 8, 9, 10, 11, 12 13, 14, 15, 16, 17, 18, 19, 20, 21, 22, 23, 24, 25, 26, 27, 28, 29, 30, 31, 32, 33, 34, 35, 36, 37, 38, 39, 40, 41, 42, 43, 44, 45, 46, 47, 48, 49 or 50 different endogenous sequences for base editing with different guide RNAs. In some embodiments, targeted modifications, e.g. single base editing, are used to sequentially target at least 4, 5, 6, 7, 8, 9, 10, 11, 12 13, 14, 15, 16, 17, 18, 19, 20, 21, 22, 23, 24, 25, 26, 27, 28, 29, 30, 31, 32, 33, 34, 35, 36, 37, 38, 39, 40, 41, 42, 43, 44, 45, 46, 47, 48, 49 50, or more different endogenous gene sequences for base editing with different guide RNAs.

[0780] Some aspects of the disclosure are based on the recognition that any of the base editors provided herein are capable of efficiently generating an intended mutation, such as a point mutation, in a nucleic acid (e.g., a nucleic acid within a genome of a subject) without generating a significant number of unintended mutations, such as unintended point mutations (i.e., mutation of bystanders). In some embodiments, any of the base editors provided herein are capable of generating at least 0.01% of intended mutations (i.e., at least 0.01% base editing efficiency). In some embodiments, any of the base editors provided herein are capable of generating at least 0.01%, 1%, 2%, 3%, 4%, 5%, 10%, 15%, 20%, 25%, 30%, 40%, 45%, 50%, 60%, 70%, 80%, 90%, 95%, or 99% of intended mutations.

[0781] In some embodiments, any of base editor systems comprising one of the ABE8 base editor variants described herein result in less than 50%, less than 40%, less than 30%, less than 20%, less than 19%, less than 18%, less than 17%, less than 16%, less than 15%, less than 14%, less than 13%, less than 12%, less than 11%, less than 10%, less than 9%, less than 8%, less than 7%, less than 6%, less than 5%, less than 4%, less than 3%, less than 2%, less than 1%, less than 0.9%, less than 0.8%, less than 0.7%, less than 0.6%, less than 0.5%, less than 0.4%, less than 0.3%, less than 0.2%, less than 0.1%, less than 0.09%, less than 0.08%, less than 0.07%, less than 0.06%, less than 0.05%, less than 0.04%, less than 0.03%, less than 0.02%, or less than 0.01% indel formation in the target polynucleotide sequence. In some embodiments, any of base editor systems comprising one of the ABE8 base editor variants described herein result in less than 0.8% indel formation in the target polynucleotide sequence. In some embodiments, any of base editor systems comprising one of the ABE8 base editor variants described herein result in at most 0.8% indel formation in the target polynucleotide sequence. In some embodiments, any of base editor systems comprising one of the ABE8 base editor variants described herein result in less than 0.3% indel formation in the target polynucleotide sequence. In some embodiments, any of base editor systems comprising one of the ABE8 base editor variants described results in lower indel formation in the target polynucleotide sequence compared to a base editor system comprising one of ABE7 base editors. In some embodiments, any of base editor systems comprising one of the ABE8 base editor variants described herein results in lower indel formation in the target polynucleotide sequence compared to a base editor system comprising an ABE7.10.

[0782] In some embodiments, any of base editor systems comprising one of the ABE8 base editor variants described herein has reduction in indel frequency compared to a base editor system comprising one of the ABE7 base editors. In some embodiments, any of base editor systems comprising one of the ABE8 base editor variants described herein has at least 0.01%, at least 1%, at least 2%, at least 3%, at least 4%, at least 5%, at least 10%, at least 15%, at least 20%, at least 25%, at least 30%, at least 35%, at least 40%, at least 45%, at least 50%, at least 55%, at least 60%, at least 65%, at least 70%, at least 75%, at least 80%, at least 85%, at least 90%, or at least 95% reduction in indel frequency compared to a base editor system comprising one of the ABE7 base editors. In some embodiments, a base editor system comprising one of the ABE8 base editor variants described herein has at least 0.01%, at least 1%, at least 2%, at least 3%, at least 4%, at least 5%, at least 10%, at least 15%, at least 20%, at least 25%, at least 30%, at least 35%, at least 40%, at least 45%, at least 50%, at least 55%, at least 60%, at least 65%, at least 70%, at least 75%, at least 80%, at least 85%, at least 90%, or at least 95% reduction in indel frequency compared to a base editor system comprising an ABE7.10.

[0783] The invention provides adenosine deaminase variants (e.g., ABE8 variants) that have increased efficiency and specificity. In particular, the adenosine deaminase variants described herein are more likely to edit a desired base within a polynucleotide, and are less likely to edit bases that are not intended to be altered (e.g., “bystanders”).

[0784] In some embodiments, any of the base editing system comprising one of the ABE8 base editor variants described herein has reduced bystander editing or mutations. In some embodiments, an unintended editing or mutation is a bystander mutation or bystander editing, for example, base editing of a target base (e.g., A or C) in an unintended or non-target position in a target window of a target nucleotide sequence. In some embodiments, any of the base editing system comprising one of the ABE8 base editor variants described herein has reduced bystander editing or mutations compared to a base editor system comprising an ABE7 base editor, e.g., ABE7.10. In some embodiments, any of the base editing system comprising one of the ABE8 base editor variants described herein has reduced bystander editing or mutations by at least 1%, at least 2%, at least 3%, at least 4%, at least 5%, at least 10%, at least 15%, at least 20%, at least 25%, at least 30%, at least 35%, at least 40%, at least 45%, at least 50%, at least 55%, at least 60%, at least 65%, at least 70%, at least 75%, at least 80%, at least 85%, at least 90%, at least 95%, or at least 99% compared to a base editor system comprising an ABE7 base editor, e.g., ABE7.10. In some embodiments, any of the base editing system comprising one of the ABE8 base editor variants described herein has reduced bystander editing or mutations by at least 1.1 fold, at least 1.2 fold, at least 1.3 fold, at least 1.4 fold, at least 1.5 fold, at least 1.6 fold, at least 1.7 fold, at least 1.8 fold, at least 1.9 fold, at least 2.0 fold, at least 2.1 fold, at least 2.2 fold, at least 2.3 fold, at least 2.4 fold, at least 2.5 fold, at least 2.6 fold, at least 2.7 fold, at least 2.8 fold, at least 2.9 fold, or at least 3.0 fold compared to a base editor system comprising an ABE7 base editor, e.g., ABE7.10.

[0785] In some embodiments, any of the base editing system comprising one of the ABE8 base editor variants described herein has reduced spurious editing. In some embodiments, an unintended editing or mutation is a spurious mutation or spurious editing, for example, non-specific editing or guide independent editing of a target base (e.g., A or C) in an unintended or non-target region of the genome. In some embodiments, any of the base editing system comprising one of the ABE8 base editor variants described herein has reduced spurious editing compared to a base editor system comprising an ABE7 base editor, e.g., ABE7.10. In some embodiments, any of the base editing system comprising one of the ABE8 base editor variants described herein has reduced spurious editing by at least 1%, at least 2%, at least 3%, at least 4%, at least 5%, at least 10%, at least 15%, at least 20%, at least 25%, at least 30%, at least 35%, at least 40%, at least 45%, at least 50%, at least 55%, at least 60%, at least 65%, at least 70%, at least 75%, at least 80%, at least 85%, at least 90%, at least 95%, or at least 99% compared to a base editor system comprising an ABE7 base editor, e.g., ABE7.10. In some embodiments, any of the base editing system comprising one of the ABE8 base editor variants described herein has reduced spurious editing by at least 1.1 fold, at least 1.2 fold, at least 1.3 fold, at least 1.4 fold, at least 1.5 fold, at least 1.6 fold, at least 1.7 fold, at least 1.8 fold, at least 1.9 fold, at least 2.0 fold, at least 2.1 fold, at least 2.2 fold, at least 2.3 fold, at least 2.4 fold, at least 2.5 fold, at least 2.6 fold, at least 2.7 fold, at least 2.8 fold, at least 2.9 fold, or at least 3.0 fold compared to a base editor system comprising an ABE7 base editor, e.g., ABE7.10.

[0786] In some embodiments, any of the ABE8 base editor variants described herein have at least 0.01%, at least 1%, at least 2%, at least 3%, at least 4%, at least 5%, at least 10%, at least 15%, at least 20%, at least 25%, at least 30%, at least 35%, at least 40%, at least 45%, at least 50%, at least 55%, at least 60%, at least 65%, at least 70%, at least 75%, at least 80%, at least 85%, at least 90%, at least 95%, or at least 99% base editing efficiency. In some embodiments, the base editing efficiency may be measured by calculating the percentage of edited nucleobases in a population of cells. In some embodiments, any of the ABE8 base editor variants described herein have base editing efficiency of at least 0.01%, at least 1%, at least 2%, at least 3%, at least 4%, at least 5%, at least 10%, at least 15%, at least 20%, at least 25%, at least 30%, at least 35%, at least 40%, at least 45%, at least 50%, at least 55%, at least 60%, at least 65%, at least 70%, at least 75%, at least 80%, at least 85%, at least 90%, at least 95%, or at least 99% as measured by edited nucleobases in a population of cells.

[0787] In some embodiments, any of the ABE8 base editor variants described herein has higher base editing efficiency compared to the ABE7 base editors. In some embodiments, any of the ABE8 base editor variants described herein have at least 1%, at least 2%, at least 3%, at least 4%, at least 5%, at least 10%, at least 15%, at least 20%, at least 25%, at least 30%, at least 35%, at least 40%, at least 45%, at least 50%, at least 55%, at least 60%, at least 65%, at least 70%, at least 75%, at least 80%, at least 85%, at least 90%, at least 95%, at least 99%, at least 100%, at least 105%, at least 110%, at least 115%, at least 120%, at least 125%, at least 130%, at least 135%, at least 140%, at least 145%, at least 150%, at least 155%, at least 160%, at least 165%, at least 170%, at least 175%, at least 180%, at least 185%, at least 190%, at least 195%, at least 200%, at least 210%, at least 220%, at least 230%, at least 240%, at least 250%, at least 260%, at least 270%, at least 280%, at least 290%, at least 300%, at least 310%, at least 320%, at least 330%, at least 340%, at least 350%, at least 360%, at least 370%, at least 380%, at least 390%, at least 400%, at least 450%, or at least 500% higher base editing efficiency compared to an ABE7 base editor, e.g., ABE7.10.

[0788] In some embodiments, any of the ABE8 base editor variants described herein has at least 1.1 fold, at least 1.2 fold, at least 1.3 fold, at least 1.4 fold, at least 1.5 fold, at least 1.6 fold, at least 1.7 fold, at least 1.8 fold, at least 1.9 fold, at least 2.0 fold, at least 2.1 fold, at least 2.2 fold, at least 2.3 fold, at least 2.4 fold, at least 2.5 fold, at least 2.6 fold, at least 2.7 fold, at least 2.8 fold, at least 2.9 fold, at least 3.0 fold, at least 3.1 fold, at least 3.2, at least 3.3 fold, at least 3.4 fold, at least 3.5 fold, at least 3.6 fold, at least 3.7 fold, at least 3.8 fold, at least 3.9 fold, at least 4.0 fold, at least 4.1 fold, at least 4.2 fold, at least 4.3 fold, at least 4.4 fold, at least 4.5 fold, at least 4.6 fold, at least 4.7 fold, at least 4.8 fold, at least 4.9 fold, or at least 5.0 fold higher base editing efficiency compared to an ABE7 base editor, e.g., ABE7.10.

[0789] In some embodiments, any of the ABE8 base editor variants described herein have at least 0.01%, at least 1%, at least 2%, at least 3%, at least 4%, at least 5%, at least 10%, at least 15%, at least 20%, at least 25%, at least 30%, at least 35%, at least 40%, at least 45%, at least 50%, at least 55%, at least 60%, at least 65%, at least 70%, at least 75%, at least 80%, at least 85%, at least 90%, at least 95%, or at least 99% on-target base editing efficiency. In some embodiments, any of the ABE8 base editor variants described herein have on-target base editing efficiency of at least 0.01%, at least 1%, at least 2%, at least 3%, at least 4%, at least 5%, at least 10%, at least 15%, at least 20%, at least 25%, at least 30%, at least 35%, at least 40%, at least 45%, at least 50%, at least 55%, at least 60%, at least 65%, at least 70%, at least 75%, at least 80%, at least 85%, at least 90%, at least 95%, or at least 99% as measured by edited target nucleobases in a population of cells.

[0790] In some embodiments, any of the ABE8 base editor variants described herein has higher on-target base editing efficiency compared to the ABE7 base editors. In some embodiments, any of the ABE8 base editor variants described herein have at least 1%, at least 2%, at least 3%, at least 4%, at least 5%, at least 10%, at least 15%, at least 20%, at least 25%, at least 30%, at least 35%, at least 40%, at least 45%, at least 50%, at least 55%, at least 60%, at least 65%, at least 70%, at least 75%, at least 80%, at least 85%, at least 90%, at least 95%, at least 99%, at least 100%, at least 105%, at least 110%, at least 115%, at least 120%, at least 125%, at least 130%, at least 135%, at least 140%, at least 145%, at least 150%, at least 155%, at least 160%, at least 165%, at least 170%, at least 175%, at least 180%, at least 185%, at least 190%, at least 195%, at least 200%, at least 210%, at least 220%, at least 230%, at least 240%, at least 250%, at least 260%, at least 270%, at least 280%, at least 290%, at least 300%, at least 310%, at least 320%, at least 330%, at least 340%, at least 350%, at least 360%, at least 370%, at least 380%, at least 390%, at least 400%, at least 450%, or at least 500% higher on-target base editing efficiency compared to an ABE7 base editor, e.g., ABE7.10.

[0791] In some embodiments, any of the ABE8 base editor variants described herein has at least 1.1 fold, at least 1.2 fold, at least 1.3 fold, at least 1.4 fold, at least 1.5 fold, at least 1.6 fold, at least 1.7 fold, at least 1.8 fold, at least 1.9 fold, at least 2.0 fold, at least 2.1 fold, at least 2.2 fold, at least 2.3 fold, at least 2.4 fold, at least 2.5 fold, at least 2.6 fold, at least 2.7 fold, at least 2.8 fold, at least 2.9 fold, at least 3.0 fold, at least 3.1 fold, at least 3.2 fold, at least 3.3 fold, at least 3.4 fold, at least 3.5 fold, at least 3.6 fold, at least 3.7 fold, at least 3.8 fold, at least 3.9 fold, at least 4.0 fold, at least 4.1 fold, at least 4.2 fold, at least 4.3 fold, at least 4.4 fold, at least 4.5 fold, at least 4.6 fold, at least 4.7 fold, at least 4.8 fold, at least 4.9 fold, or at least 5.0 fold higher on-target base editing efficiency compared to an ABE7 base editor, e.g., ABE7.10.

[0792] The ABE8 base editor variants described herein may be delivered to a host cell via a plasmid, a vector, a LNP complex, or an mRNA. In some embodiments, any of the ABE8 base editor variants described herein is delivered to a host cell as an mRNA. In some embodiments, an ABE8 base editor delivered via a nucleic acid based delivery system, e.g., an mRNA, has on-target editing efficiency of at least at least 1%, at least 2%, at least 3%, at least 4%, at least 5%, at least 10%, at least 15%, at least 20%, at least 25%, at least 30%, at least 35%, at least 40%, at least 45%, at least 50%, at least 55%, at least 60%, at least 65%, at least 70%, at least 75%, at least 80%, at least 85%, at least 90%, at least 95%, or at least 99% as measured by edited nucleobases. In some embodiments, an ABE8 base editor delivered by an mRNA system has higher base editing efficiency compared to an ABE8 base editor delivered by a plasmid or vector system. In some embodiments, any of the ABE8 base editor variants described herein has at least 1%, at least 2%, at least 3%, at least 4%, at least 5%, at least 10%, at least 15%, at least 20%, at least 25%, at least 30%, at least 35%, at least 40%, at least 45%, at least 50%, at least 55%, at least 60%, at least 65%, at least 70%, at least 75%, at least 80%, at least 85%, at least 90%, at least 95%, at least 99%, at least 100%, at least 105%, at least 110%, at least 115%, at least 120%, at least 125%, at least 130%, at least 135%, at least 140%, at least 145%, at least 150%, at least 155%, at least 160%, at least 165%, at least 170%, at least 175%, at least 180%, at least 185%, at least 190%, at least 195%, at least 200%, at least 210%, at least 220%, at least 230%, at least 240%, at least 250%, at least 260%, at least 270%, at least 280%, at least 290%, at least 300% higher, at least 310%, at least 320%, at least 330%, at least 340%, at least 350%, at least 360%, at least 370%, at least 380%, at least 390%, at least 400%, at least 450%, or at least 500% on-target editing efficiency when delivered by an mRNA system compared to when delivered by a plasmid or vector system. In some embodiments, any of the ABE8 base editor variants described herein has at least 1.1 fold, at least 1.2 fold, at least 1.3 fold, at least 1.4 fold, at least 1.5 fold, at least 1.6 fold, at least 1.7 fold, at least 1.8 fold, at least 1.9 fold, at least 2.0 fold, at least 2.1 fold, at least 2.2 fold, at least 2.3 fold, at least 2.4 fold, at least 2.5 fold, at least 2.6 fold, at least 2.7 fold, at least 2.8 fold, at least 2.9 fold, at least 3.0 fold, at least 3.1 fold, at least 3.2 fold, at least 3.3 fold, at least 3.4 fold, at least 3.5 fold, at least 3.6 fold, at least 3.7 fold, at least 3.8 fold, at least 3.9 fold, at least 4.0 fold, at least 4.1 fold, at least 4.2 fold, at least 4.3 fold, at least 4.4 fold, at least 4.5 fold, at least 4.6 fold, at least 4.7 fold, at least 4.8 fold, at least 4.9 fold, or at least 5.0 fold higher on-target editing efficiency when delivered by an mRNA system compared to when delivered by a plasmid or vector system.

[0793] In some embodiments, any of base editor systems comprising one of the ABE8 base editor variants described herein result in less than 50%, less than 40%, less than 30%, less than 20%, less than 19%, less than 18%, less than 17%, less than 16%, less than 15%, less than 14%, less than 13%, less than 12%, less than 11%, less than 10%, less than 9%, less than 8%, less than 7%, less than 6%, less than 5%, less than 4%, less than 3%, less than 2%, less than 1%, less than 0.9%, less than 0.8%, less than 0.7%, less than 0.6%, less than 0.5%, less than 0.4%, less than 0.3%, less than 0.2%, less than 0.1%, less than 0.09%, less than 0.08%, less than 0.07%, less than 0.06%, less than 0.05%, less than 0.04%, less than 0.03%, less than 0.02%, or less than 0.01% off-target editing in the target polynucleotide sequence.

[0794] In some embodiments, any of the ABE8 base editor variants described herein has lower guided off-target editing efficiency when delivered by an mRNA system compared to when delivered by a plasmid or vector system. In some embodiments, any of the ABE8 base editor variants described herein has at least 1%, at least 2%, at least 3%, at least 4%, at least 5%, at least 10%, at least 15%, at least 20%, at least 25%, at least 30%, at least 35%, at least 40%, at least 45%, at least 50%, at least 55%, at least 60%, at least 65%, at least 70%, at least 75%, at least 80%, at least 85%, at least 90%, at least 95%, or at least 99% lower guided off-target editing efficiency when delivered by an mRNA system compared to when delivered by a plasmid or vector system. In some embodiments, any of the ABE8 base editor variants described herein has at least 1.1 fold, at least 1.2 fold, at least 1.3 fold, at least 1.4 fold, at least 1.5 fold, at least 1.6 fold, at least 1.7 fold, at least 1.8 fold, at least 1.9 fold, at least 2.0 fold, at least 2.1 fold, at least 2.2 fold, at least 2.3 fold, at least 2.4 fold, at least 2.5 fold, at least 2.6 fold, at least 2.7 fold, at least 2.8 fold, at least 2.9 fold, or at least 3.0 fold lower guided off-target editing efficiency when delivered by an mRNA system compared to when delivered by a plasmid or vector system. In some embodiments, any of the ABE8 base editor variants described herein has at least about 2.2 fold decrease in guided off-target editing efficiency when delivered by an mRNA system compared to when delivered by a plasmid or vector system.

[0795] In some embodiments, any of the ABE8 base editor variants described herein has lower guide-independent off-target editing efficiency when delivered by an mRNA system compared to when delivered by a plasmid or vector system. In some embodiments, any of the ABE8 base editor variants described herein has at least 1%, at least 2%, at least 3%, at least 4%, at least 5%, at least 10%, at least 15%, at least 20%, at least 25%, at least 30%, at least 35%, at least 40%, at least 45%, at least 50%, at least 55%, at least 60%, at least 65%, at least 70%, at least 75%, at least 80%, at least 85%, at least 90%, at least 95%, or at least 99% lower guide-independent off-target editing efficiency when delivered by an mRNA system compared to when delivered by a plasmid or vector system. In some embodiments, any of the ABE8 base editor variants described herein has at least 1.1 fold, at least 1.2 fold, at least 1.3 fold, at least 1.4 fold, at least 1.5 fold, at least 1.6 fold, at least 1.7 fold, at least 1.8 fold, at least 1.9 fold, at least 2.0 fold, at least 2.1 fold, at least 2.2 fold, at least 2.3 fold, at least 2.4 fold, at least 2.5 fold, at least 2.6 fold, at least 2.7 fold, at least 2.8 fold, at least 2.9 fold, at least 3.0 fold, at least 5.0 fold, at least 10.0 fold, at least 20.0 fold, at least 50.0 fold, at least 70.0 fold, at least 100.0 fold, at least 120.0 fold, at least 130.0 fold, or at least 150.0 fold lower guide-independent off-target editing efficiency when delivered by an mRNA system compared to when delivered by a plasmid or vector system. In some embodiments, ABE8 base editor variants described herein has 134.0 fold decrease in guide-independent off-target editing efficiency (e.g., spurious RNA deamination) when delivered by an mRNA system compared to when delivered by a plasmid or vector system. In some embodiments, ABE8 base editor variants described herein does not increase guide-independent mutation rates across the genome.

[0796] In some embodiments, a single gene delivery event (e.g., by transduction, transfection, electroporation or any other method) can be used to target base editing of 5 sequences within a cell's genome. In some embodiments, a single gene delivery event can be used to target base editing of 6 sequences within a cell's genome. In some embodiments, a single gene delivery event can be used to target base editing of 7 sequences within a cell's genome. In some embodiments, a single electroporation event can be used to target base editing of 8 sequences within a cell's genome. In some embodiments, a single gene delivery event can be used to target base editing of 9 sequences within a cell's genome. In some embodiments, a single gene delivery event can be used to target base editing of 10 sequences within a cell's genome. In some embodiments, a single gene delivery event can be used to target base editing of 20 sequences within a cell's genome. In some embodiments, a single gene delivery event can be used to target base editing of 30 sequences within a cell's genome. In some embodiments, a single gene delivery event can be used to target base editing of 40 sequences within a cell's genome. In some embodiments, a single gene delivery event can be used to target base editing of 50 sequences within a cell's genome.

[0797] In some embodiments, the method described herein, for example, the base editing methods has minimum to no off-target effects.

[0798] In some embodiments, the base editing method described herein results in at least 50% of a cell population that have been successfully edited (i.e., cells that have been successfully engineered). In some embodiments, the base editing method described herein results in at least 55% of a cell population that have been successfully edited. In some embodiments, the base editing method described herein results in at least 60% of a cell population that have been successfully edited. In some embodiments, the base editing method described herein results in at least 65% of a cell population that have been successfully edited. In some embodiments, the base editing method described herein results in at least 70% of a cell population that have been successfully edited. In some embodiments, the base editing method described herein results in at least 75% of a cell population that have been successfully edited. In some embodiments, the base editing method described herein results in at least 80% of a cell population that have been successfully edited. In some embodiments, the base editing method described herein results in at least 85% of a cell population that have been successfully edited. In some embodiments, the base editing method described herein results in at least 90% of a cell population that have been successfully edited. In some embodiments, the base editing method described herein results in at least 95% of a cell population that have been successfully edited. In some embodiments, the base editing method described herein results in about 91%, 92%, 93%, 94%, 95%, 96%, 97%, 98%, 99% or 100% of a cell population that have been successfully edited.

[0799] In some embodiments, the live cell recovery following a base editing intervention is greater than at least 60%, 70%, 80%, 90% of the starting cell population at the time of the base editing event. In some embodiments, the live cell recovery as described above is about 70%. In some embodiments, the live cell recovery as described above is about 75%. In some embodiments, the live cell recovery as described above is about 80%. In some embodiments, the live cell recovery as described above is about 85%. In some embodiments, the live cell recovery as described above is about 90%, or about 91%, 92%, 93%, 94% 95%, 96%, 97%, 98%, or 99%, or 100% of the cells in the population at the time of the base editing event.

[0800] In some embodiments the engineered cell population can be further expanded in vitro by about 2 fold, about 3-fold, about 4-fold, about 5-fold, about 6-fold, about 7-fold, about 8-fold, about 9-fold, about 10-fold, about 15-fold, about 20-fold, about 25-fold, about 30-fold, about 35-fold, about 40-fold, about 45-fold, about 50-fold, or about 100-fold.

[0801] The number of intended mutations and indels can be determined using any suitable method, for example, as described in International PCT Application Nos. PCT/2017/045381 (WO2018/027078) and PCT/US2016/058344 (WO2017/070632); Komor, A. C., et al., “Programmable editing of a target base in genomic DNA without double-stranded DNA cleavage” Nature 533, 420-424 (2016); Gaudelli, N. M., et al., “Programmable base editing of A·T to G·C in genomic DNA without DNA cleavage” Nature 551, 464-471 (2017); and Komor, A. C., et al., “Improved base excision repair inhibition and bacteriophage Mu Gam protein yields C:G-to-T:A base editors with higher efficiency and product purity” Science Advances 3:eaao4774 (2017); the entire contents of which are hereby incorporated by reference.

[0802] In some embodiments, to calculate indel frequencies, sequencing reads are scanned for exact matches to two 10-bp sequences that flank both sides of a window in which indels can occur. If no exact matches are located, the read is excluded from analysis. If the length of this indel window exactly matches the reference sequence the read is classified as not containing an indel. If the indel window is two or more bases longer or shorter than the reference sequence, then the sequencing read is classified as an insertion or deletion, respectively. In some embodiments, the base editors provided herein can limit formation of indels in a region of a nucleic acid. In some embodiments, the region is at a nucleotide targeted by a base editor or a region within 2, 3, 4, 5, 6, 7, 8, 9, or 10 nucleotides of a nucleotide targeted by a base editor.

[0803] The number of indels formed at a target nucleotide region can depend on the amount of time a nucleic acid (e.g., a nucleic acid within the genome of a cell) is exposed to a base editor. In some embodiments, the number or proportion of indels is determined after at least 1 hour, at least 2 hours, at least 6 hours, at least 12 hours, at least 24 hours, at least 36 hours, at least 48 hours, at least 3 days, at least 4 days, at least 5 days, at least 7 days, at least 10 days, or at least 14 days of exposing the target nucleotide sequence (e.g., a nucleic acid within the genome of a cell) to a base editor. It should be appreciated that the characteristics of the base editors as described herein can be applied to any of the fusion proteins, or methods of using the fusion proteins provided herein.

[0804] Details of base editor efficiency are described in International PCT Application Nos. PCT/2017/045381 (WO 2018/027078) and PCT/US2016/058344 (WO 2017/070632), each of which is incorporated herein by reference for its entirety. Also see Komor, A. C., et al., “Programmable editing of a target base in genomic DNA without double-stranded DNA cleavage” Nature 533, 420-424 (2016); Gaudelli, N. M., et al., “Programmable base editing of A·T to G·C in genomic DNA without DNA cleavage” Nature 551, 464-471 (2017); and Komor, A. C., et al., “Improved base excision repair inhibition and bacteriophage Mu Gam protein yields C:G-to-T:A base editors with higher efficiency and product purity” Science Advances 3:eaao4774 (2017), the entire contents of which are hereby incorporated by reference. In some embodiments, editing of a plurality of nucleobase pairs in one or more genes using the methods provided herein results in formation of at least one intended mutation. In some embodiments, said formation of said at least one intended mutation results in the disruption the normal function of a gene. In some embodiments, said formation of said at least one intended mutation results decreases or eliminates the expression of a protein encoded by a gene. It should be appreciated that multiplex editing can be accomplished using any method or combination of methods provided herein.

### Multiplex Editing

[0805] In some embodiments, the base editor system provided herein is capable of multiplex editing of a plurality of nucleobase pairs in one or more genes. In embodiments, multiplex editing involves administering to a cell and/or subject one or more base editors in combination with two or more distinct gRNAs (e.g., gRNA37 and gRNA40). Any two or more of the guide RNAs listed in Table 1, or gRNAs comprising a spacer sequence(s) listed in Tables 2A-2C or in the Sequence Listing (e.g., SEQ ID NOs: 3105-5485 and 8220-10830) can be administered simultaneously to a subject or cell for multiplexed editing. In some embodiments, the plurality of nucleobase pairs is located in the same gene or in one or more genes, wherein at least one gene is located in a different locus. In some embodiments, the multiplex editing can comprise one or more guide polynucleotides. In some embodiments, the multiplex editing can comprise one or more base editor systems. In some embodiments, the multiplex editing can comprise one or more base editor systems with a single guide polynucleotide or a plurality of guide polynucleotides. In some embodiments, the multiplex editing can comprise one or more guide polynucleotides with a single base editor system. In some embodiments, the multiplex editing can comprise at least one guide polynucleotide that does or does not require a PAM sequence to target binding to a target polynucleotide sequence. In some embodiments, the multiplex editing can comprise a mix of at least one guide polynucleotide that does not require a PAM sequence to target binding to a target polynucleotide sequence and at least one guide polynucleotide that require a PAM sequence to target binding to a target polynucleotide sequence. It should be appreciated that the characteristics of the multiplex editing using any of the base editors as described herein can be applied to any combination of methods using any base editor provided herein. It should also be appreciated that the multiplex editing using any of the base editors as described herein can comprise a sequential editing of a plurality of nucleobase pairs.

[0806] In some embodiments, the plurality of nucleobase pairs are in one more genes. In some embodiments, the plurality of nucleobase pairs is in the same gene. In some embodiments, at least one gene in the one more genes is located in a different locus.

[0807] In some embodiments, the editing is editing of the plurality of nucleobase pairs in at least one protein coding region, in at least one protein non-coding region, or in at least one protein coding region and at least one protein non-coding region.

[0808] In some embodiments, the editing is in conjunction with one or more guide polynucleotides. In some embodiments, the base editor system can comprise one or more base editor systems. In some embodiments, the base editor system can comprise one or more base editor systems in conjunction with a single guide polynucleotide or a plurality of guide polynucleotides. In some embodiments, the editing is in conjunction with one or more guide polynucleotide with a single base editor system. In some embodiments, the editing is in conjunction with at least one guide polynucleotide that does not require a PAM sequence to target binding to a target polynucleotide sequence or with at least one guide polynucleotide that requires a PAM sequence to target binding to a target polynucleotide sequence, or with a mix of at least one guide polynucleotide that does not require a PAM sequence to target binding to a target polynucleotide sequence and at least one guide polynucleotide that does require a PAM sequence to target binding to a target polynucleotide sequence. It should be appreciated that the characteristics of the multiplex editing using any of the base editors as described herein can be applied to any of combination of the methods of using any of the base editors provided herein. It should also be appreciated that the editing can comprise a sequential editing of a plurality of nucleobase pairs.

[0809] In some embodiments, the base editor system capable of multiplex editing of a plurality of nucleobase pairs in one or more genes comprises one of ABE7, ABE8, and/or ABE9 base editors. In some embodiments, the base editor system capable of multiplex editing comprising one of the ABE8 base editor variants described herein has higher multiplex editing efficiency compared to the base editor system capable of multiplex editing comprising one of ABE7 base editors. In some embodiments, the base editor system capable of multiplex editing comprising one of the ABE8 base editor variants described herein has at least 1%, at least 2%, at least 3%, at least 4%, at least 5%, at least 10%, at least 15%, at least 20%, at least 25%, at least 30%, at least 35%, at least 40%, at least 45%, at least 50%, at least 55%, at least 60%, at least 65%, at least 70%, at least 75%, at least 80%, at least 85%, at least 90%, at least 95%, at least 99%, at least 100%, at least 105%, at least 110%, at least 115%, at least 120%, at least 125%, at least 130%, at least 135%, at least 140%, at least 145%, at least 150%, at least 155%, at least 160%, at least 165%, at least 170%, at least 175%, at least 180%, at least 185%, at least 190%, at least 195%, at least 200%, at least 210%, at least 220%, at least 230%, at least 240%, at least 250%, at least 260%, at least 270%, at least 280%, at least 290%, at least 300% higher, at least 310%, at least 320%, at least 330%, at least 340%, at least 350%, at least 360%, at least 370%, at least 380%, at least 390%, at least 400%, at least 450%, or at least 500% higher multiplex editing efficiency compared the base editor system capable of multiplex editing comprising one of ABE7 base editors. In some embodiments, the base editor system capable of multiplex editing comprising one of the ABE8 base editor variants described herein has at least 1.1 fold, at least 1.2 fold, at least 1.3 fold, at least 1.4 fold, at least 1.5 fold, at least 1.6 fold, at least 1.7 fold, at least 1.8 fold, at least 1.9 fold, at least 2.0 fold, at least 2.1 fold, at least 2.2 fold, at least 2.3 fold, at least 2.4 fold, at least 2.5 fold, at least 2.6 fold, at least 2.7 fold, at least 2.8 fold, at least 2.9 fold, at least 3.0 fold, at least 3.1 fold, at least 3.2 fold, at least 3.3 fold, at least 3.4 fold, at least 3.5 fold, at least 4.0 fold, at least 4.5 fold, at least 5.0 fold, at least 5.5 fold, or at least 6.0 fold higher multiplex editing efficiency compared the base editor system capable of multiplex editing comprising one of ABE7 base editors.

### Delivery System

[0810] The suitability of nucleobase editors to target one or more nucleotides in a gene (e.g., the HBV core protein (Core), the HBV polymerase gene (Pol), the HBV surface protein (S), or the HBV protein X gene (X)) is evaluated as described herein. In one embodiment, a single cell of interest is transfected, transduced, or otherwise modified with a nucleic acid molecule or molecules encoding a base editing system described herein together with a small amount of a vector encoding a reporter (e.g., GFP). These cells can be any cell line known in the art, including hepatocytes and HEK293 cells. Alternatively, primary cells (e.g., human) may be used. Cells may also be obtained from a subject or individual, such as from tissue biopsy, surgery, blood, plasma, serum, or other biological fluid. Such cells may be relevant to the eventual cell target.

[0811] Delivery may be performed using a viral vector. In one embodiment, transfection may be performed using lipid transfection (such as Lipofectamine or Fugene) or by electroporation. Following transfection, expression of a reporter (e.g., GFP) can be determined either by fluorescence microscopy or by flow cytometry to confirm consistent and high levels of transfection. These preliminary transfections can comprise different nucleobase editors to determine which combinations of editors give the greatest activity. The system can comprise one or more different vectors. In one embodiment, the base editor is codon optimized for expression of the desired cell type, preferentially a eukaryotic cell, preferably a mammalian cell or a human cell.

[0812] The activity of the nucleobase editor is assessed as described herein, i.e., by sequencing the genome of the cells to detect alterations in a target sequence. For Sanger sequencing, purified PCR amplicons are cloned into a plasmid backbone, transformed, miniprepped and sequenced with a single primer. Sequencing may also be performed using next generation sequencing (NGS) techniques. When using next generation sequencing, amplicons may be 300-500 bp with the intended cut site placed asymmetrically. Following PCR, next generation sequencing adapters and barcodes (for example Illumina multiplex adapters and indexes) may be added to the ends of the amplicon, e.g., for use in high throughput sequencing (for example on an Illumina MiSeq). The fusion proteins that induce the greatest levels of target specific alterations in initial tests can be selected for further evaluation.

[0813] In particular embodiments, the nucleobase editors are used to target polynucleotides of interest. In one embodiment, a nucleobase editor of the invention is delivered to cells (e.g., hepatocytes or HEK293 cells) in conjunction with one or more guide RNAs that are used to target one or more nucleic acid sequences of interest within the genome of a cell, thereby altering the target gene(s) (e.g., the HBV core protein (Core), the HBV polymerase gene (Pol), the HBV surface protein (S), or the HBV protein X gene (X)). In some embodiments, a base editor is targeted by one or more guide RNAs to introduce one or more edits to the sequence of one or more genes of interest (e.g., the HBV core protein (Core), the HBV polymerase gene (Pol), the HBV surface protein (S), or the HBV protein X gene (X)). In some embodiments, the one or more edits to the sequence of one or more genes of interest decrease or eliminate expression of the protein encoded by the gene in the host cell (e.g., a hepatocyte or HEK293 cell). In some embodiments, expression of one or more proteins encoded by one or more genes of interest (e.g., the HBV core protein (Core), the HBV polymerase gene (Pol), the HBV surface protein (S), or the HBV protein X gene (X)) is completely knocked out or eliminated in the host cell ((e.g., hepatocyte or HEK293 cell).

[0814] In some embodiments, the host cell is a mammalian cell. In some embodiments, the host cell is a human cell.

### Nucleic Acid-Based Delivery of Base Editor Systems

[0815] Nucleic acid molecules encoding a base editor system according to the present disclosure can be administered to subjects or delivered into cells in vitro or in vivo by art-known methods or as described herein. For example, a base editor system comprising a deaminase (e.g., cytidine or adenine deaminase) can be delivered by vectors (e.g., viral or non-viral vectors), or by naked DNA, DNA complexes, lipid nanoparticles, or a combination of the aforementioned compositions.

[0816] Nanoparticles, which can be organic or inorganic, are useful for delivering a base editor system or component thereof. Nanoparticles are well known in the art and any suitable nanoparticle can be used to deliver a base editor system or component thereof, or a nucleic acid molecule encoding such components. In one example, organic (e.g. lipid and/or polymer) nanoparticles are suitable for use as delivery vehicles in certain embodiments of this disclosure. Exemplary lipids for use in nanoparticle formulations, and/or gene transfer are shown in Table 17 (below).

TABLE 17
Lipids used for gene transfer.

| Lipids Used for Gene Transfer | | |
|---|---|---|
| Lipid | Abbreviation | Feature |
| 1,2-Dioleoyl-sn-glycero-3-phosphatidylcholine | DOPC | Helper |
| 1,2-Dioleoyl-sn-glycero-3-phosphatidylethanolamine | DOPE | Helper |
| Cholesterol | | Helper |
| N-[1-(2,3-Dioleyloxy)prophyl]N,N,N-trimethylammonium | DOTMA | Cationic |
| chloride | | |
| 1,2-Dioleoyloxy-3-trimethylammonium-propane | DOTAP | Cationic |
| Dioctadecylamidoglycylspermine | DOGS | Cationic |
| N-(3-Aminopropyl)-N,N-dimethyl-2,3-bis(dodecyloxy)-1- | GAP-DLRIE | Cationic |
| propanaminium bromide | | |
| Cetyltrimethylammonium bromide | CTAB | Cationic |
| 6-Lauroxyhexyl ornithinate | LHON | Cationic |
| 1-(2,3-Dioleoyloxypropyl)-2,4,6-trimethylpyridinium | 2Oc | Cationic |
| 2,3-Dioleyloxy-N-[2(sperminecarboxamido-ethyl]-N,N- | DOSPA | Cationic |
| dimethyl-1-propanaminium trifluoroacetate | | |
| 1,2-Dioleyl-3-trimethylammonium-propane | DOPA | Cationic |
| N-(2-Hydroxyethyl)-N,N-dimethyl-2,3-bis(tetradecyloxy)-1- | MDRIE | Cationic |
| propanaminium bromide | | |
| Dimyristooxypropyl dimethyl hydroxyethyl ammonium bromide | DMRI | Cationic |
| 3β-[N-(N′,N′-Dimethylaminoethane)-carbamoyl]cholesterol | DC-Chol | Cationic |
| Bis-guanidium-tren-cholesterol | BGTC | Cationic |
| 1,3-Diodeoxy-2-(6-carboxy-spermyl)-propylamide | DOSPER | Cationic |
| Dimethyloctadecylammonium bromide | DDAB | Cationic |
| Dioctadecylamidoglicylspermidin | DSL | Cationic |
| rac-[(2,3-Dioctadecyloxypropyl)(2-hydroxyethyl)]- | CLIP-1 | Cationic |
| dimethylammonium chloride | | |
| rac-[2(2,3-Dihexadecyloxypropyl- | CLIP-6 | Cationic |
| oxymethyloxy)ethyl]trimethylammoniun bromide | | |
| Ethyldimyristoylphosphatidylcholine | EDMPC | Cationic |
| 1,2-Distearyloxy-N,N-dimethyl-3-aminopropane | DSDMA | Cationic |
| 1,2-Dimyristoyl-trimethylammonium propane | DMTAP | Cationic |
| O,O′-Dimyristyl-N-lysyl aspartate | DMKE | Cationic |
| 1,2-Distearoyl-sn-glycero-3-ethylpho sphocholine | DSEPC | Cationic |
| N-Palmitoyl D-erythro-sphingosyl carbamoyl-spermine | CCS | Cationic |
| N-t-Butyl-N0-tetradecyl-3-tetradecylaminopropionamidine | diC14-amidine | Cationic |
| Octadecenolyoxy[ethyl-2-heptadecenyl-3 hydroxyethyl] | DOTIM | Cationic |
| imidazolinium chloride | | |
| N1-Cholesteryloxycarbonyl-3,7-diazanonane-1,9-diamine | CDAN | Cationic |
| 2-(3-[Bis(3-amino-propyl)-amino]propylamino)-N- | RPR209120 | Cationic |
| ditetradecylcarbamoylme-ethyl-acetamide | | |
| 1,2-dilinoleyloxy-3-dimethylaminopropane | DLinDMA | Cationic |
| 2,2-dilinoleyl-4-dimethylaminoethyl-[1,3]-dioxolane | DLin-KC2-DMA | Cationic |
| dilinoleyl-methyl-4-dimethylaminobutyrate | DLin-MC3-DMA | Cationic |

[0817] Table 18 lists exemplary polymers for use in gene transfer and/or nanoparticle formulations.

TABLE 18
Polymers used for gene transfer.

| Polymers Used for Gene Transfer | |
|---|---|
| Polymer | Abbreviation |
| Poly(ethylene)glycol | PEG |
| Polyethylenimine | PEI |
| Dithiobis (succinimidylpropionate) | DSP |
| Dimethyl-3,3′-dithiobispropionimidate | DTBP |
| Poly(ethylene imine)biscarbamate | PEIC |
| Poly(L-lysine) | PLL |
| Histidine modified PLL | |
| Poly(N-vinylpyrrolidone) | PVP |
| Poly(propylenimine) | PPI |
| Poly(amidoamine) | PAMAM |
| Poly(amidoethylenimine) | SS-PAEI |
| Triethylenetetramine | TETA |
| Poly(β-aminoester) | |
| Poly(4-hydroxy-L-proline ester) | PHP |
| Poly(allylamine) | |
| Poly(α-[4-aminobutyl]-L-glycolic acid) | PAGA |
| Poly(D,L-lactic-co-glycolic acid) | PLGA |
| Poly(N-ethyl-4-vinylpyridinium bromide) | |
| Poly(phosphazene)s | PPZ |
| Poly (phosphoester)s | PPE |
| Poly(phosphoramidate)s | PPA |
| Poly(N-2-hydroxypropylmethacrylamide) | pHPMA |
| Poly (2-(dimethylamino)ethyl methacrylate) | pDMAEMA |
| Poly(2-aminoethyl propylene phosphate) | PPE-EA |
| Chitosan | |
| Galactosylated chitosan | |
| N-Dodacylated chitosan | |
| Histone | |
| Collagen | |
| Dextran-spermine | D-SPM |

[0818] Table 19 summarizes delivery methods for a polynucleotide encoding a fusion protein described herein.

TABLE 19
Delivery methods.

| | | Delivery into | | | Type of |
|---|---|---|---|---|---|
| | | Non-Dividing | Duration of | Genome | Molecule |
| Delivery | Vector/Mode | Cells | Expression | Integration | Delivered |
| Physical | (e.g., | YES | Transient | NO | Nucleic Acids |
| | electroporation, | | | | and Proteins |
| | particle gun, | | | | |
| | Calcium | | | | |
| | Phosphate | | | | |
| | transfection | | | | |
| Viral | Retrovirus | NO | Stable | YES | RNA |
| | Lentivirus | YES | Stable | YES/NO with | RNA |
| | | | | modification | |
| | Adenovirus | YES | Transient | NO | DNA |
| | Adeno- | YES | Stable | NO | DNA |
| | Associated | | | | |
| | Virus (AAV) | | | | |
| | Vaccinia Virus | YES | Very | NO | DNA |
| | | | Transient | | |
| | Herpes Simplex | YES | Stable | NO | DNA |
| | Virus | | | | |
| Non-Viral | Cationic | YES | Transient | Depends on | Nucleic Acids |
| | Liposomes | | | what is | and Proteins |
| | | | | delivered | |
| | Polymeric | YES | Transient | Depends on | Nucleic Acids |
| | Nanoparticles | | | what is | and Proteins |
| | | | | delivered | |
| Biological | Attenuated | YES | Transient | NO | Nucleic Acids |
| Non-Viral | Bacteria | | | | |
| Delivery | Engineered | YES | Transient | NO | Nucleic Acids |
| Vehicles | Bacteriophages | | | | |
| | Mammalian | YES | Transient | NO | Nucleic Acids |
| | Virus-like | | | | |
| | Particles | | | | |
| | Biological | YES | Transient | NO | Nucleic Acids |
| | liposomes: | | | | |
| | Erythrocyte | | | | |
| | Ghosts and | | | | |
| | Exosomes | | | | |

[0819] In another aspect, the delivery of base editor system components or nucleic acids encoding such components, for example, a polynucleotide programmable nucleotide binding domain (e.g., Cas9) such as, for example, Cas9 or variants thereof, and a gRNA targeting a nucleic acid sequence of interest, may be accomplished by delivering the ribonucleoprotein (RNP) to cells. The RNP comprises a polynucleotide programmable nucleotide binding domain (e.g., Cas9), in complex with the targeting gRNA. RNPs or polynucleotides described herein may be delivered to cells using known methods, such as electroporation, nucleofection, or cationic lipid-mediated methods, for example, as reported by Zuris, J. A. et al., 2015, Nat. Biotechnology, 33(1):73-80, which is incorporated by reference in its entirety. RNPs are advantageous for use in CRISPR base editing systems, particularly for cells that are difficult to transfect, such as primary cells. In addition, RNPs can also alleviate difficulties that may occur with protein expression in cells, especially when eukaryotic promoters, e.g., CMV or EFIA, which may be used in CRISPR plasmids, are not well-expressed. Advantageously, the use of RNPs does not require the delivery of foreign DNA into cells. Moreover, because an RNP comprising a nucleic acid binding protein and gRNA complex is degraded over time, the use of RNPs has the potential to limit off-target effects. In a manner similar to that for plasmid based techniques, RNPs can be used to deliver binding protein (e.g., Cas9 variants) and to direct homology directed repair (HDR).

[0820] Nucleic acid molecules encoding a base editor system can be delivered directly to cells (e.g., a hepatocyte) as naked DNA or RNA by means of transfection or electroporation, for example, or can be conjugated to molecules (e.g., N-acetylgalactosamine) promoting uptake by the target cells. Vectors encoding base editor systems and/or their components can also be used. In particular embodiments, a polynucleotide, e.g. a mRNA encoding a base editor system or a functional component thereof, may be co-electroporated with one or more guide RNAs as described herein.

[0821] Nucleic acid vectors can comprise one or more sequences encoding a domain of a fusion protein described herein. A vector can also encode a protein component of a base editor system operably linked to a nuclear localization signal, nucleolar localization signal, or mitochondrial localization signal. As one example, a vector can include a Cas9 coding sequence that includes one or more nuclear localization sequences (e.g., a nuclear localization sequence from SV40), and one or more deaminases.

[0822] The vector can also include any suitable number of regulatory/control elements, e.g., promoters, enhancers, introns, polyadenylation signals, Kozak consensus sequences, or internal ribosome entry sites (IRES). These elements are well known in the art.

[0823] Vectors according to this disclosure include recombinant viral vectors. Exemplary viral vectors are set forth herein above. Other viral vectors known in the art can also be used. In addition, viral particles can be used to deliver base editor system components in nucleic acid and/or protein form. For example, “empty” viral particles can be assembled to contain a base editor system or component as cargo. Viral vectors and viral particles can also be engineered to incorporate targeting ligands to alter target tissue specificity.

[0824] Vectors described herein may comprise regulatory elements to drive expression of a base editor system or component thereof. Such vectors include adeno-associated viruses with inverted long terminal repeats (AAV ITR). The use of AAV-ITR can be advantageous for eliminating the need for an additional promoter element, which can take up space in the vector. The additional space freed up can be used to drive the expression of additional elements, such as a guide nucleic acid or a selectable marker. ITR activity can be used to reduce potential toxicity due to over expression.

[0825] Any suitable promoter can be used to drive expression of a base editor system or component thereof and, where appropriate, the guide nucleic acid. For ubiquitous expression, promoters include CMV, CAG, CBh, PGK, SV40, Ferritin heavy or light chains. For brain or other CNS cell expression, suitable promoters include: SynapsinI for all neurons, CaMKIIalpha for excitatory neurons, GAD67 or GAD65 or VGAT for GABAergic neurons. For liver cell expression, suitable promoters include the Albumin promoter. For lung cell expression, suitable promoters include SP-B. For endothelial cells, suitable promoters include ICAM. For hematopoietic cell expression suitable promoters include IFNbeta or CD45. For osteoblast expression suitable promoters can include OG-2.

[0826] In some embodiments, a base editor system of the present disclosure is of small enough size to allow separate promoters to drive expression of the base editor and a compatible guide nucleic acid within the same nucleic acid molecule. For instance, a vector or viral vector can comprise a first promoter operably linked to a nucleic acid encoding the base editor and a second promoter operably linked to the guide nucleic acid.

[0827] The promoter used to drive expression of a guide nucleic acid can include: Pol III promoters, such as U6 or H1 Use of Pol II promoter and intronic cassettes to express gRNA Adeno Associated Virus (AAV).

[0828] In particular embodiments, a fusion protein of the invention is encoded by a polynucleotide present in a viral vector (e.g., adeno-associated virus (AAV), AAV3, AAV3b, AAV4, AAV5, AAV6, AAV7, AAV8, AAV9, AAVrh8, AAV10, and variants thereof), or a suitable capsid protein of any viral vector. Thus, in some aspects, the disclosure relates to the viral delivery of a fusion protein. Examples of viral vectors include retroviral vectors (e.g. Maloney murine leukemia virus, MML-V), adenoviral vectors (e.g. AD100), lentiviral vectors (HIV and FIV-based vectors), herpesvirus vectors (e.g. HSV-2).

[0829] In some aspects, the methods described herein for editing specific genes in a cell can be used to genetically modify the cell.

### Viral Vectors

[0830] A base editor described herein can therefore be delivered with viral vectors. In some embodiments, a base editor disclosed herein can be encoded on a nucleic acid that is contained in a viral vector. In some embodiments, one or more components of the base editor system can be encoded on one or more viral vectors. For example, a base editor and guide nucleic acid can be encoded on a single viral vector. In other embodiments, the base editor and guide nucleic acid are encoded on different viral vectors. In either case, the base editor and guide nucleic acid can each be operably linked to a promoter and terminator. The combination of components encoded on a viral vector can be determined by the cargo size constraints of the chosen viral vector.

[0831] The use of RNA or DNA viral based systems for the delivery of a base editor takes advantage of highly evolved processes for targeting a virus to specific cells in culture or in the host and trafficking the viral payload to the nucleus or host cell genome. Viral vectors can be administered directly to cells in culture, patients (in vivo), or they can be used to treat cells in vitro, and the modified cells can optionally be administered to patients (ex vivo). Conventional viral based systems could include retroviral, lentivirus, adenoviral, adeno-associated and herpes simplex virus vectors for gene transfer. Integration in the host genome is possible with the retrovirus, lentivirus, and adeno-associated virus gene transfer methods, often resulting in long term expression of the inserted transgene. Additionally, high transduction efficiencies have been observed in many different cell types and target tissues.

[0832] Viral vectors can include lentivirus (e.g., HIV and FIV-based vectors), Adenovirus (e.g., AD100), Retrovirus (e.g., Maloney murine leukemia virus, MML-V), herpesvirus vectors (e.g., HSV-2), and Adeno-associated viruses (AAVs), or other plasmid or viral vector types, in particular, using formulations and doses from, for example, U.S. Pat. No. 8,454,972 (formulations, doses for adenovirus), U.S. Pat. No. 8,404,658 (formulations, doses for AAV) and U.S. Pat. No. 5,846,946 (formulations, doses for DNA plasmids) and from clinical trials and publications regarding the clinical trials involving lentivirus, AAV and adenovirus. For example, for AAV, the route of administration, formulation and dose can be as in U.S. Pat. No. 8,454,972 and as in clinical trials involving AAV. For Adenovirus, the route of administration, formulation and dose can be as in U.S. Pat. No. 8,404,658 and as in clinical trials involving adenovirus. For plasmid delivery, the route of administration, formulation and dose can be as in U.S. Pat. No. 5,846,946 and as in clinical studies involving plasmids. Doses can be based on or extrapolated to an average 70 kg individual (e.g. a male adult human), and can be adjusted for patients, subjects, mammals of different weight and species. Frequency of administration is within the ambit of the medical or veterinary practitioner (e.g., physician, veterinarian), depending on usual factors including the age, sex, general health, other conditions of the patient or subject and the particular condition or symptoms being addressed. The viral vectors can be injected into the tissue of interest. For cell-type specific base editing, the expression of the base editor and optional guide nucleic acid can be driven by a cell-type specific promoter.

[0833] The tropism of a retrovirus can be altered by incorporating foreign envelope proteins, expanding the potential target population of target cells. Lentiviral vectors are retroviral vectors that are able to transduce or infect non-dividing cells and typically produce high viral titers. Selection of a retroviral gene transfer system would therefore depend on the target tissue. Retroviral vectors are comprised of cis-acting long terminal repeats with packaging capacity for up to 6-10 kb of foreign sequence. The minimum cis-acting LTRs are sufficient for replication and packaging of the vectors, which are then used to integrate the therapeutic gene into the target cell to provide permanent transgene expression. Widely used retroviral vectors include those based upon murine leukemia virus (MuLV), gibbon ape leukemia virus (GaLV), Simian Immuno deficiency virus (SIV), human immuno deficiency virus (HIV), and combinations thereof (See, e.g., Buchscher et al., J. Virol. 66:2731-2739 (1992); Johann et al., J. Virol. 66:1635-1640 (1992); Sommnerfelt et al., Virol. 176:58-59 (1990); Wilson et al., J. Virol. 63:2374-2378 (1989); Miller et al., J. Virol. 65:2220-2224 (1991); PCT/US94/05700).

[0834] Retroviral vectors, especially lentiviral vectors, can require polynucleotide sequences smaller than a given length for efficient integration into a target cell. For example, retroviral vectors of length greater than 9 kb can result in low viral titers compared with those of smaller size. In some aspects, a base editor of the present disclosure is of sufficient size so as to enable efficient packaging and delivery into a target cell via a retroviral vector. In some embodiments, a base editor is of a size so as to allow efficient packing and delivery even when expressed together with a guide nucleic acid and/or other components of a targetable nuclease system.

[0835] Packaging cells are typically used to form virus particles that are capable of infecting a host cell. Such cells include 293 cells, which package adenovirus, and psi.2 cells or PA317 cells, which package retrovirus. Viral vectors used in gene therapy are usually generated by producing a cell line that packages a nucleic acid vector into a viral particle. The vectors typically contain the minimal viral sequences required for packaging and subsequent integration into a host, other viral sequences being replaced by an expression cassette for the polynucleotide(s) to be expressed. The missing viral functions are typically supplied in trans by the packaging cell line. For example, Adeno-associated virus (“AAV”) vectors used in gene therapy typically only possess ITR sequences from the AAV genome which are required for packaging and integration into the host genome. Viral DNA can be packaged in a cell line, which contains a helper plasmid encoding the other AAV genes, namely rep and cap, but lacking ITR sequences. The cell line can also be infected with adenovirus as a helper. The helper virus can promote replication of the AAV vector and expression of AAV genes from the helper plasmid. The helper plasmid in some cases is not packaged in significant amounts due to a lack of ITR sequences. Contamination with adenovirus can be reduced by, e.g., heat treatment to which adenovirus is more sensitive than AAV.

[0836] In applications where transient expression is preferred, adenoviral based systems can be used. Adenoviral based vectors are capable of very high transduction efficiency in many cell types and do not require cell division. With such vectors, high titer and levels of expression have been obtained. This vector can be produced in large quantities in a relatively simple system. Adeno-associated virus (“AAV”) vectors can also be used to transduce cells with target nucleic acids, e.g., in the in vitro production of nucleic acids and peptides, and for in vivo and ex vivo gene therapy procedures (See, e.g., West et al., Virology 160:38-47 (1987); U.S. Pat. No. 4,797,368; WO 93/24641; Kotin, Human Gene Therapy 5:793-801 (1994); Muzyczka, J. Clin. Invest. 94:1351 (1994). The construction of recombinant AAV vectors is described in a number of publications, including U.S. Pat. No. 5,173,414; Tratschin et al., Mol. Cell. Biol. 5:3251-3260 (1985); Tratschin, et al., Mol. Cell. Biol. 4:2072-2081 (1984); Hermonat & Muzyczka, PNAS 81:6466-6470 (1984); and Samulski et al., J. Virol. 63:03822-3828 (1989).

[0837] AAV is a small, single-stranded DNA dependent virus belonging to the parvovirus family. The 4.7 kb wild-type (wt) AAV genome is made up of two genes that encode four replication proteins and three capsid proteins, respectively, and is flanked on either side by 145-bp inverted terminal repeats (ITRs). The virion is composed of three capsid proteins, Vp1, Vp2, and Vp3, produced in a 1:1:10 ratio from the same open reading frame but from differential splicing (Vp1) and alternative translational start sites (Vp2 and Vp3, respectively). Vp3 is the most abundant subunit in the virion and participates in receptor recognition at the cell surface defining the tropism of the virus. A phospholipase domain, which functions in viral infectivity, has been identified in the unique N terminus of Vp1.

[0838] Similar to wt AAV, recombinant AAV (rAAV) utilizes the cis-acting 145-bp ITRs to flank vector transgene cassettes, providing up to 4.5 kb for packaging of foreign DNA. Subsequent to infection, rAAV can express a fusion protein of the invention and persist without integration into the host genome by existing episomally in circular head-to-tail concatemers. Although there are numerous examples of rAAV success using this system, in vitro and in vivo, the limited packaging capacity has limited the use of AAV-mediated gene delivery when the length of the coding sequence of the gene is equal or greater in size than the wt AAV genome.

[0839] Viral vectors can be selected based on the application. For example, for in vivo gene delivery, AAV can be advantageous over other viral vectors. In some embodiments, AAV allows low toxicity, which can be due to the purification method not requiring ultra-centrifugation of cell particles that can activate the immune response. In some embodiments, AAV allows low probability of causing insertional mutagenesis because it doesn't integrate into the host genome. Adenoviruses are commonly used as vaccines because of the strong immunogenic response they induce. Packaging capacity of the viral vectors can limit the size of the base editor that can be packaged into the vector.

[0840] AAV has a packaging capacity of about 4.5 Kb or 4.75 Kb including two 145 base inverted terminal repeats (ITRs). This means disclosed base editor as well as a promoter and transcription terminator can fit into a single viral vector. Constructs larger than 4.5 or 4.75 Kb can lead to significantly reduced virus production. For example, SpCas9 is quite large, the gene itself is over 4.1 Kb, which makes it difficult for packing into AAV. Therefore, embodiments of the present disclosure include utilizing a disclosed base editor which is shorter in length than conventional base editors. In some examples, the base editors are less than 4 kb. Disclosed base editors can be less than 4.5 kb, 4.4 kb, 4.3 kb, 4.2 kb, 4.1 kb, 4 kb, 3.9 kb, 3.8 kb, 3.7 kb, 3.6 kb, 3.5 kb, 3.4 kb, 3.3 kb, 3.2 kb, 3.1 kb, 3 kb, 2.9 kb, 2.8 kb, 2.7 kb, 2.6 kb, 2.5 kb, 2 kb, or 1.5 kb. In some embodiments, the disclosed base editors are 4.5 kb or less in length.

[0841] An AAV can be AAV1, AAV2, AAV5 or any combination thereof. One can select the type of AAV with regard to the cells to be targeted; e.g., one can select AAV serotypes 1, 2, 5 or a hybrid capsid AAV1, AAV2, AAV5 or any combination thereof for targeting brain or neuronal cells; and one can select AAV4 for targeting cardiac tissue. AAV8 is useful for delivery to the liver. A tabulation of certain AAV serotypes as to these cells can be found in Grimm, D. et al, J. Virol. 82: 5887-5911 (2008)).

[0842] In some embodiments, lentiviral vectors are used to transduce a cell of interest with a polynucleotide encoding a base editor system. Lentiviruses are complex retroviruses that have the ability to infect and express their genes in both mitotic and post-mitotic cells. The most commonly known lentivirus is the human immunodeficiency virus (HIV), which uses the envelope glycoproteins of other viruses to target a broad range of cell types.

[0843] Lentiviruses can be prepared as follows. After cloning pCasES10 (which contains a lentiviral transfer plasmid backbone), HEK293FT at low passage (p=5) were seeded in a T-75 flask to 50% confluence the day before transfection in DMEM with 10% fetal bovine serum and without antibiotics. After 20 hours, media is changed to OptiMEM (serum-free) media and transfection was done 4 hours later. Cells are transfected with 10 μg of lentiviral transfer plasmid (pCasES10) and the following packaging plasmids: 5 μg of pMD2.G (VSV-g pseudotype), and 7.5 μg of psPAX2 (gag/pol/rev/tat). Transfection can be done in 4 mL OptiMEM with a cationic lipid delivery agent (50 μl Lipofectamine 2000 and 100 μl Plus reagent). After 6 hours, the media is changed to antibiotic-free DMEM with 10% fetal bovine serum. These methods use serum during cell culture, but serum-free methods are preferred.

[0844] Lentivirus can be purified as follows. Viral supernatants are harvested after 48 hours. Supernatants are first cleared of debris and filtered through a 0.45 μm low protein binding (PVDF) filter. They are then spun in an ultracentrifuge for 2 hours at 24,000 rpm. Viral pellets are resuspended in 50 μl of DMEM overnight at 4° C. They are then aliquoted and immediately frozen at −80° C.

[0845] In another embodiment, minimal non-primate lentiviral vectors based on the equine infectious anemia virus (EIAV) are also contemplated. In another embodiment, RetinoStat®, an equine infectious anemia virus-based lentiviral gene therapy vector that expresses angiostatic proteins endostatin and angiostatin that is contemplated to be delivered via a subretinal injection. In another embodiment, use of self-inactivating lentiviral vectors are contemplated.

[0846] Any RNA of the systems, for example a guide RNA or a base editor-encoding mRNA, can be delivered in the form of RNA. Base editor-encoding mRNA can be generated using in vitro transcription. For example, nuclease mRNA can be synthesized using a PCR cassette containing the following elements: T7 promoter, optional kozak sequence (GCCACC), nuclease sequence, and 3′ UTR such as a 3′ UTR from beta globin-polyA tail. The cassette can be used for transcription by T7 polymerase. Guide polynucleotides (e.g., gRNA) can also be transcribed using in vitro transcription from a cassette containing a T7 promoter, followed by the sequence “GG”, and guide polynucleotide sequence.

[0847] To enhance expression and reduce possible toxicity, the base editor-coding sequence and/or the guide nucleic acid can be modified to include one or more modified nucleoside e.g. using pseudo-U or 5-Methyl-C.

[0848] The small packaging capacity of AAV vectors makes the delivery of a number of genes that exceed this size and/or the use of large physiological regulatory elements challenging. These challenges can be addressed, for example, by dividing the protein(s) to be delivered into two or more fragments, wherein the N-terminal fragment is fused to a split intein-N and the C-terminal fragment is fused to a split intein-C. These fragments are then packaged into two or more AAV vectors. As used herein, “intein” refers to a self-splicing protein intron (e.g., peptide) that ligates flanking N-terminal and C-terminal exteins (e.g., fragments to be joined). The use of certain inteins for joining heterologous protein fragments is described, for example, in Wood et al., J. Biol. Chem. 289(21); 14512-9 (2014). For example, when fused to separate protein fragments, the inteins IntN and IntC recognize each other, splice themselves out and simultaneously ligate the flanking N- and C-terminal exteins of the protein fragments to which they were fused, thereby reconstituting a full-length protein from the two protein fragments. Other suitable inteins will be apparent to a person of skill in the art.

[0849] A fragment of a fusion protein of the invention can vary in length. In some embodiments, a protein fragment ranges from 2 amino acids to about 1000 amino acids in length. In some embodiments, a protein fragment ranges from about 5 amino acids to about 500 amino acids in length. In some embodiments, a protein fragment ranges from about 20 amino acids to about 200 amino acids in length. In some embodiments, a protein fragment ranges from about 10 amino acids to about 100 amino acids in length. Suitable protein fragments of other lengths will be apparent to a person of skill in the art.

[0850] In one embodiment, dual AAV vectors are generated by splitting a large transgene expression cassette in two separate halves (5′ and 3′ ends, or head and tail), where each half of the cassette is packaged in a single AAV vector (of <5 kb). The re-assembly of the full-length transgene expression cassette is then achieved upon co-infection of the same cell by both dual AAV vectors followed by: (1) homologous recombination (HR) between 5′ and 3′ genomes (dual AAV overlapping vectors); (2) ITR-mediated tail-to-head concatemerization of 5′ and 3′ genomes (dual AAV trans-splicing vectors); or (3) a combination of these two mechanisms (dual AAV hybrid vectors). The use of dual AAV vectors in vivo results in the expression of full-length proteins. The use of the dual AAV vector platform represents an efficient and viable gene transfer strategy for transgenes of >4.7 kb in size.

### Inteins

[0851] Inteins (intervening protein) are auto-processing domains found in a variety of diverse organisms, which carry out a process known as protein splicing. Protein splicing is a multi-step biochemical reaction comprised of both the cleavage and formation of peptide bonds. While the endogenous substrates of protein splicing are proteins found in intein-containing organisms, inteins can also be used to chemically manipulate virtually any polypeptide backbone.

[0852] In protein splicing, the intein excises itself out of a precursor polypeptide by cleaving two peptide bonds, thereby ligating the flanking extein (external protein) sequences via the formation of a new peptide bond. This rearrangement occurs post-translationally (or possibly co-translationally). Intein-mediated protein splicing occurs spontaneously, requiring only the folding of the intein domain.

[0853] About 5% of inteins are split inteins, which are transcribed and translated as two separate polypeptides, the N-intein and C-intein, each fused to one extein. Upon translation, the intein fragments spontaneously and non-covalently assemble into the canonical intein structure to carry out protein splicing in trans. The mechanism of protein splicing entails a series of acyl-transfer reactions that result in the cleavage of two peptide bonds at the intein-extein junctions and the formation of anew peptide bond between the N- and C-exteins. This process is initiated by activation of the peptide bond joining the N-extein and the N-terminus of the intein. Virtually all inteins have a cysteine or serine at their N-terminus that attacks the carbonyl carbon of the C-terminal N-extein residue. This N to O/S acyl-shift is facilitated by a conserved threonine and histidine (referred to as the TXXH motif), along with a commonly found aspartate, which results in the formation of a linear (thio)ester intermediate. Next, this intermediate is subject to trans-(thio)esterification by nucleophilic attack of the first C-extein residue (+1), which is a cysteine, serine, or threonine. The resulting branched (thio)ester intermediate is resolved through a unique transformation: cyclization of the highly conserved C-terminal asparagine of the intein. This process is facilitated by the histidine (found in a highly conserved HNF motif) and the penultimate histidine and may also involve the aspartate. This succinimide formation reaction excises the intein from the reactive complex and leaves behind the exteins attached through a non-peptidic linkage. This structure rapidly rearranges into a stable peptide bond in an intein-independent fashion.

[0854] In some embodiments, a portion or fragment of a nuclease (e.g., Cas9) is fused to an intein. The nuclease can be fused to the N-terminus or the C-terminus of the intein. In some embodiments, a portion or fragment of a fusion protein is fused to an intein and fused to an AAV capsid protein. The intein, nuclease and capsid protein can be fused together in any arrangement (e.g., nuclease-intein-capsid, intein-nuclease-capsid, capsid-intein-nuclease, etc.). In some embodiments, an N-terminal fragment of a base editor (e.g., ABE, CBE) is fused to a split intein-N and a C-terminal fragment is fused to a split intein-C. These fragments are then packaged into two or more AAV vectors. In some embodiments, the N-terminus of an intein is fused to the C-terminus of a fusion protein and the C-terminus of the intein is fused to the N-terminus of an AAV capsid protein.

[0855] In one embodiment, inteins are utilized to join fragments or portions of a cytidine or adenosine deaminase base editor protein that is grafted onto an AAV capsid protein. The use of certain inteins for joining heterologous protein fragments is described, for example, in Wood et al., J. Biol. Chem. 289(21); 14512-9 (2014). For example, when fused to separate protein fragments, the inteins IntN and IntC recognize each other, splice themselves out and simultaneously ligate the flanking N- and C-terminal exteins of the protein fragments to which they were fused, thereby reconstituting a full-length protein from the two protein fragments. Other suitable inteins will be apparent to a person of skill in the art.

[0856] In some embodiments, an ABE was split into N- and C-terminal fragments at Ala, Ser, Thr, or Cys residues within selected regions of SpCas9. These regions correspond to loop regions identified by Cas9 crystal structure analysis.

[0857] The N-terminus of each fragment is fused to an intein-N and the C-terminus of each fragment is fused to an intein C at amino acid positions S303, T310, T313, S355, A456, S460, A463, T466, S469, T472, T474, C574, S577, A589, and S590, which are indicated in capital letters in the sequence below (called the “Cas9 reference sequence”).

| (SEQ ID NO: 197) | |
|---|---|
| 1 | mdkkysigld igtnsvgwav itdeykvpsk kfkvlgntdr hsikknliga llfdsgetae |
| 61 | atrlkrtarr rytrrknric ylqeifsnem akvddsffhr leesflveed kkherhpifg |
| 121 | nivdevayhe kyptiyhlrk klvdstdkad lrliylalah mikfrghfli egdlnpdnsd |
| 181 | vdklfiqlvq tynqlfeenp inasgvdaka ilsarlsksr rlenliaqlp gekknglfgn |
| 241 | lialslgltp nfksnfdlae daklqlskdt ydddldnlla qigdqyadlf laaknlsdai |
| 301 | llSdilrvnT eiTkaplsas mikrydehhq dltllkalvr qqlpekykei ffdqSkngya |
| 361 | gyidggasqe efykfikpil ekmdgteell vklnredllr kqrtfdngsi phqihlgelh |
| 421 | ailrrqedfy pflkdnreki ekiltfripy yvgplArgnS rfAwmTrkSe eTiTpwnfee |
| 481 | vvdkgasaqs fiermtnfdk nlpnekvlpk hsllyeyftv yneltkvkyv tegmrkpafl |
| 541 | sgeqkkaivd llfktnrkvt vkqlkedyfk kieCfdSvei sgvedrfnAS lgtyhdllki |
| 601 | ikdkdfldne enedilediv ltltlfedre mieerlktya hlfddkvmkq lkrrrytgwg |
| 661 | rlsrklingi rdkqsgktil dflksdgfan rnfmqlihdd sltfkediqk aqvsgqgdsl |
| 721 | hehianlags paikkgilqt vkvvdelvkv mgrhkpeniv iemarenqtt qkgqknsrer |
| 781 | mkrieegike lgsqilkehp ventqlqnek lylyylangr dmyvdqeldi nrlsdydvdh |
| 841 | ivpqsflkdd sidnkvltrs dknrgksdnv pseevvkkmk nywrqllnak litqrkfdnl |
| 901 | tkaergglse ldkagfikrq lvetrqitkh vaqildsrmn tkydendkli revkvitlks |
| 961 | klvsdfrkdf qfykvreinn yhhahdayln avvgtalikk ypklesefvy gdykvydvrk |
| 1021 | miakseqeig katakyffys nimnffktei tlangeirkr plietngetg eivwdkgrdf |
| 1081 | atvrkvlsmp qvnivkktev qtggfskesi lpkrnsdkli arkkdwdpkk yggfdsptva |
| 1141 | ysvlvvakve kgkskklksv kellgitime rssfeknpid fleakgykev kkdliiklpk |
| 1201 | yslfelengr krmlasagel qkgnelalps kyvnflylas hyeklkgspe dneqkqlfve |
| 1261 | qhkhyldeii eqisefskrv iladanldkv lsaynkhrdk pireqaenii hlftltnlga |
| 1321 | paafkyfdtt idrkrytstk evldatlihq sitglyetri dlsqlggd |

### Pharmaceutical Compositions

[0858] In some aspects, the present invention provides a pharmaceutical composition comprising any of the genetically modified cells, base editors, fusion proteins, or the fusion protein-guide polynucleotide complexes described herein.

[0859] In embodiments, a pharmaceutical composition of the present disclosure comprises an antiretroviral drug (e.g., lamivudine) for treatment of a retroviral infection (e.g., an HBV infection). Non-limiting examples of antiretroviral drugs include adefovir, tenofovir, telbivudine, interferons (e.g., Interferon alfa-2b (Intron A), Peg-Interferon), Lymphotoxin p receptor (LTBR), nucleoside/nucleotide reverse transcriptase inhibitors (NRTIs) (e.g., abacavir (Ziagen), Didanosine, emtricitabine (Emtriva), lamivudine (Epivir), Stavudine, tenofovir disoproxil fumarate (Viread), Tenofovir alafenamide, and zidovudine (Retrovir)), non-nucleoside reverse transcriptase inhibitors (NNRTIs) (e.g., Delavirdine, doravirine (Pifeltro), efavirenz (Sustiva), etravirine (Intelence), nevirapine (Viramune), rilpivirine (Edurant), and Delavirdine), post-attachment inhibitors or monoclonal antibodies (e.g., Ibalizumab-uiyk), CCR5 Antagonists (e.g., Maraviroc), Atazanavir, Darunavir, Cobicistat, Lopinavir, Maraviroc, Nevirapine, Rilpivirine, Elvitegravir+TDF+FTC+cobicistat, Elvitegravir+TAF+FTC+cobicistat, Integrase inhibitors (e.g., Bictegravir, Cabotegravir, Cabotegravir and rilpivirine, Dolutegravir, Elvitegravir, fosamprenavir (Lexiva, Telzir), and Raltegravir), Fusion inhibitors (e.g., Enfuvirtide), entry inhibitors (e.g., Maraviroc), protease inhibitors (PIs) (e.g., Atazanavir, Darunavir, Lopinavir, indinavir (Crixivan), lopinavir/ritonavir (Kaletra), ritonavir (Norvir), saquinavir (Invirase), and tipranavir (Aptivus)), attachment and post-attachment inhibitors (e.g., Fostemsavir, Ibalizumab), and Entecavir. In an embodiment, the antiretroviral drug is selected from one or more of Lamivudine; Entecavir; Tenofovir; Interferon; and Peg-Interferon.

[0860] The pharmaceutical compositions of the present invention can be prepared in accordance with known techniques. See, e.g., Remington, The Science And Practice of Pharmacy (21st ed. 2005). In general, the cell, population thereof, base editors, fusion protein, or any other component of the compositions of the disclosure is admixed with a suitable carrier prior to administration or storage, and in some embodiments, the pharmaceutical composition further comprises a pharmaceutically acceptable carrier. Suitable pharmaceutically acceptable carriers generally comprise inert substances that aid in administering the pharmaceutical composition to a subject, aid in processing the pharmaceutical compositions into deliverable preparations, or aid in storing the pharmaceutical composition prior to administration. Pharmaceutically acceptable carriers can include agents that can stabilize, optimize or otherwise alter the form, consistency, viscosity, pH, pharmacokinetics, solubility of the formulation. Such agents include buffering agents, wetting agents, emulsifying agents, diluents, encapsulating agents, and skin penetration enhancers. For example, carriers can include, but are not limited to, saline, buffered saline, dextrose, arginine, sucrose, water, glycerol, ethanol, sorbitol, dextran, sodium carboxymethyl cellulose, and combinations thereof.

[0861] Some nonlimiting examples of materials which can serve as pharmaceutically-acceptable carriers include: (1) sugars, such as lactose, glucose and sucrose; (2) starches, such as corn starch and potato starch; (3) cellulose, and its derivatives, such as sodium carboxymethyl cellulose, methylcellulose, ethyl cellulose, microcrystalline cellulose and cellulose acetate; (4) powdered tragacanth; (5) malt; (6) gelatin; (7) lubricating agents, such as magnesium stearate, sodium lauryl sulfate and talc; (8) excipients, such as cocoa butter and suppository waxes; (9) oils, such as peanut oil, cottonseed oil, safflower oil, sesame oil, olive oil, corn oil and soybean oil; (10) glycols, such as propylene glycol; (11) polyols, such as glycerin, sorbitol, mannitol and polyethylene glycol (PEG); (12) esters, such as ethyl oleate and ethyl laurate; (13) agar; (14) buffering agents, such as magnesium hydroxide and aluminum hydroxide; (15) alginic acid; (16) pyrogen-free water; (17) isotonic saline; (18) Ringer's solution; (19) ethyl alcohol; (20) pH buffered solutions; (21) polyesters, polycarbonates and/or polyanhydrides; (22) bulking agents, such as polypeptides and amino acids (23) serum alcohols, such as ethanol; and (23) other non-toxic compatible substances employed in pharmaceutical formulations. Wetting agents, coloring agents, release agents, coating agents, sweetening agents, flavoring agents, perfuming agents, preservative and antioxidants can also be present in the formulation.

[0862] Pharmaceutical compositions can comprise one or more pH buffering compounds to maintain the pH of the formulation at a predetermined level that reflects physiological pH, such as in the range of about 5.0 to about 8.0. The pH buffering compound used in the aqueous liquid formulation can be an amino acid or mixture of amino acids, such as histidine or a mixture of amino acids such as histidine and glycine. Alternatively, the pH buffering compound is preferably an agent which maintains the pH of the formulation at a predetermined level, such as in the range of about 5.0 to about 8.0, and which does not chelate calcium ions. Illustrative examples of such pH buffering compounds include, but are not limited to, imidazole and acetate ions. The pH buffering compound may be present in any amount suitable to maintain the pH of the formulation at a predetermined level.

[0863] Pharmaceutical compositions can also contain one or more osmotic modulating agents, i.e., a compound that modulates the osmotic properties (e.g., tonicity, osmolality, and/or osmotic pressure) of the formulation to a level that is acceptable to the blood stream and blood cells of recipient individuals. The osmotic modulating agent can be an agent that does not chelate calcium ions. The osmotic modulating agent can be any compound known or available to those skilled in the art that modulates the osmotic properties of the formulation. One skilled in the art may empirically determine the suitability of a given osmotic modulating agent for use in the inventive formulation. Illustrative examples of suitable types of osmotic modulating agents include, but are not limited to: salts, such as sodium chloride and sodium acetate; sugars, such as sucrose, dextrose, and mannitol; amino acids, such as glycine; and mixtures of one or more of these agents and/or types of agents. The osmotic modulating agent(s) may be present in any concentration sufficient to modulate the osmotic properties of the formulation.

[0864] The pharmaceutical compositions of the present invention can include at least one additional therapeutic agent useful in the treatment of disease. For example, some embodiments of the pharmaceutical composition described herein further comprises a chemotherapeutic agent. In some embodiments, the pharmaceutical composition further comprises a cytokine peptide or a nucleic acid sequence encoding a cytokine peptide. In some embodiments, the pharmaceutical compositions comprising the cell or population thereof can be administered separately from an additional therapeutic agent.

[0865] One consideration concerning the therapeutic use of compositions of the invention is the quantity of an agent necessary to achieve an optimal or satisfactory effect. For example, the quantity of modified cells to be administered may vary for the subject being treated. In one embodiment, between 10⁴ to 10¹⁰, between 10⁵ to 10⁹, or between 10⁶ and 10⁸ genetically modified cells of the invention are administered to a human subject. In some embodiments, at least about 1×10⁸, 2×10⁸, 3×10⁸, 4×10⁸, and 5×10⁸ genetically modified cells of the invention are administered to a human subject. Determining the precise effective dose may be based on factors for each individual subject, including their size, age, sex, weight, and condition. Dosages can be readily ascertained by those skilled in the art from this disclosure and the knowledge in the art.

[0866] The skilled artisan can readily determine the amount of an agent and amount of optional additives, vehicles, and/or carriers in compositions and to be administered in methods of the invention. Typically, additives are present in an amount of 0.001 to 50% (weight) solution in phosphate buffered saline, and the active ingredient is present in the order of micrograms to milligrams, such as about 0.0001 to about 5 wt %, preferably about 0.0001 to about 1 wt %, still more preferably about 0.0001 to about 0.05 wt % or about 0.001 to about 20 wt %, preferably about 0.01 to about 10 wt %, and still more preferably about 0.05 to about 5 wt %. Of course, for any composition to be administered to an animal or human, and for any particular method of administration, it is preferred to determine therefore: toxicity, such as by determining the lethal dose (LD) and LD50 in a suitable animal model (e.g., a rodent such as a mouse); and, the dosage of the composition(s), concentration of components therein, and the timing of administering the composition(s), which elicit a suitable response. Such determinations do not require undue experimentation from the knowledge of the skilled artisan, this disclosure and the documents cited herein. And, the time for sequential administrations can be ascertained without undue experimentation.

[0867] In some embodiments, the pharmaceutical composition is formulated for delivery to a subject. Suitable routes of administrating the pharmaceutical composition described herein include, without limitation: topical, subcutaneous, transdermal, intradermal, intralesional, intraarticular, intraperitoneal, intravesical, transmucosal, gingival, intradental, intracochlear, transtympanic, intraorgan, epidural, intrathecal, intramuscular, intravenous, intravascular, intraosseus, periocular, intratumoral, intracerebral, and intracerebroventricular administration.

[0868] In some embodiments, the pharmaceutical composition described herein is administered locally to a diseased site (e.g., the liver). In some embodiments, the pharmaceutical composition described herein is administered to a subject by injection, by means of a catheter, by means of a suppository, or by means of an implant, the implant being of a porous, non-porous, or gelatinous material, including a membrane, such as a sialastic membrane, or a fiber.

[0869] In other embodiments, the pharmaceutical composition described herein is delivered in a controlled release system. In one embodiment, a pump can be used (see, e.g., Langer, 1990, Science 249: 1527-1533; Sefton, 1989, CRC Crit. Ref. Biomed. Eng. 14:201; Buchwald et al., 1980, Surgery 88:507; Saudek et al., 1989, N. Engl. J. Med. 321:574). In another embodiment, polymeric materials can be used. (See, e.g., Medical Applications of Controlled Release (Langer and Wise eds., CRC Press, Boca Raton, Fla., 1974); Controlled Drug Bioavailability, Drug Product Design and Performance (Smolen and Ball eds., Wiley, New York, 1984); Ranger and Peppas, 1983, Macromol. Sci. Rev. Macromol. Chem. 23:61. See also Levy et al., 1985, Science 228: 190; During et al., 1989, Ann. Neurol. 25:351; Howard et al., 1989, J. Neurosurg. 71: 105.) Other controlled release systems are discussed, for example, in Langer, supra.

[0870] In some embodiments, the pharmaceutical composition is formulated in accordance with routine procedures as a composition adapted for intravenous or subcutaneous administration to a subject, e.g., a human. In some embodiments, pharmaceutical composition for administration by injection are solutions in sterile isotonic use as solubilizing agent and a local anesthetic such as lignocaine to ease pain at the site of the injection. Generally, the ingredients are supplied either separately or mixed together in unit dosage form, for example, as a dry lyophilized powder or water free concentrate in a hermetically sealed container such as an ampoule or sachette indicating the quantity of active agent. Where the pharmaceutical is to be administered by infusion, it can be dispensed with an infusion bottle containing sterile pharmaceutical grade water or saline. Where the pharmaceutical composition is administered by injection, an ampoule of sterile water for injection or saline can be provided so that the ingredients can be mixed prior to administration.

[0871] A pharmaceutical composition for systemic administration can be a liquid, e.g., sterile saline, lactated Ringer's or Hank's solution. In addition, the pharmaceutical composition can be in solid forms and re-dissolved or suspended immediately prior to use. Lyophilized forms are also contemplated. The pharmaceutical composition can be contained within a lipid particle or vesicle, such as a liposome or microcrystal, which is also suitable for parenteral administration. The particles can be of any suitable structure, such as unilamellar or plurilamellar, so long as compositions are contained therein. Compounds can be entrapped in “stabilized plasmid-lipid particles” (SPLP) containing the fusogenic lipid dioleoylphosphatidylethanolamine (DOPE), low levels (5-10 mol %) of cationic lipid, and stabilized by a polyethyleneglycol (PEG) coating (Zhang Y. P. et al., Gene Ther. 1999, 6: 1438-47). Positively charged lipids such as N-[1-(2,3-dioleoyloxi)propyl]-N,N,N-trimethyl-amoniummethylsulfate, or “DOTAP,” are particularly preferred for such particles and vesicles. The preparation of such lipid particles is well known. See, e.g., U.S. Pat. Nos. 4,880,635; 4,906,477; 4,911,928; 4,917,951; 4,920,016; and 4,921,757; each of which is incorporated herein by reference.

[0872] The pharmaceutical composition described herein can be administered or packaged as a unit dose, for example. The term “unit dose” when used in reference to a pharmaceutical composition of the present disclosure refers to physically discrete units suitable as unitary dosage for the subject, each unit containing a predetermined quantity of active material calculated to produce the desired therapeutic effect in association with the required diluent; i.e., carrier, or vehicle.

[0873] Further, the pharmaceutical composition can be provided as a pharmaceutical kit comprising (a) a container containing a compound of the invention in lyophilized form and (b) a second container containing a pharmaceutically acceptable diluent (e.g., sterile used for reconstitution or dilution of the lyophilized compound of the invention. Optionally associated with such container(s) can be a notice in the form prescribed by a governmental agency regulating the manufacture, use or sale of pharmaceuticals or biological products, which notice reflects approval by the agency of manufacture, use or sale for human administration.

[0874] In another aspect, an article of manufacture containing materials useful for the treatment of the diseases described above is included. In some embodiments, the article of manufacture comprises a container and a label. Suitable containers include, for example, bottles, vials, syringes, and test tubes. The containers can be formed from a variety of materials such as glass or plastic. In some embodiments, the container holds a composition that is effective for treating a disease described herein and can have a sterile access port. For example, the container can be an intravenous solution bag or a vial having a stopper pierceable by a hypodermic injection needle. The active agent in the composition is a compound of the invention. In some embodiments, the label on or associated with the container indicates that the composition is used for treating the disease of choice. The article of manufacture can further comprise a second container comprising a pharmaceutically-acceptable buffer, such as phosphate-buffered saline, Ringer's solution, or dextrose solution. It can further include other materials desirable from a commercial and user standpoint, including other buffers, diluents, filters, needles, syringes, and package inserts with instructions for use.

[0875] In some embodiments, any of the fusion proteins, gRNAs, and/or complexes described herein are provided as part of a pharmaceutical composition. In some embodiments, the pharmaceutical composition comprises any of the fusion proteins provided herein. In some embodiments, the pharmaceutical composition comprises any of the complexes provided herein. In some embodiments, the pharmaceutical composition comprises a ribonucleoprotein complex comprising an RNA-guided nuclease (e.g., Cas9) that forms a complex with a gRNA and a cationic lipid. In some embodiments pharmaceutical composition comprises a gRNA, a nucleic acid programmable DNA binding protein, a cationic lipid, and a pharmaceutically acceptable excipient. Pharmaceutical compositions can optionally comprise one or more additional therapeutically active substances.

[0876] In some embodiments, compositions provided herein are administered to a subject, for example, to a human subject, in order to effect a targeted genomic modification within the subject. In some embodiments, cells are obtained from the subject and contacted with any of the pharmaceutical compositions provided herein. In some embodiments, cells removed from a subject and contacted ex vivo with a pharmaceutical composition are re-introduced into the subject, optionally after the desired genomic modification has been effected or detected in the cells. Methods of delivering pharmaceutical compositions comprising nucleases are known, and are described, for example, in U.S. Pat. Nos. 6,453,242; 6,503,717; 6,534,261; 6,599,692; 6,607,882; 6,689,558; 6,824,978; 6,933,113; 6,979,539; 7,013,219; and 7,163,824, the disclosures of all of which are incorporated by reference herein in their entireties. Although the descriptions of pharmaceutical compositions provided herein are principally directed to pharmaceutical compositions which are suitable for administration to humans, it will be understood by the skilled artisan that such compositions are generally suitable for administration to animals or organisms of all sorts, for example, for veterinary use.

[0877] Modification of pharmaceutical compositions suitable for administration to humans in order to render the compositions suitable for administration to various animals is well understood, and the ordinarily skilled veterinary pharmacologist can design and/or perform such modification with merely ordinary, if any, experimentation. Subjects to which administration of the pharmaceutical compositions is contemplated include, but are not limited to, humans and/or other primates; mammals, domesticated animals, pets, and commercially relevant mammals such as cattle, pigs, horses, sheep, cats, dogs, mice, and/or rats; and/or birds, including commercially relevant birds such as chickens, ducks, geese, and/or turkeys.

[0878] Formulations of the pharmaceutical compositions described herein can be prepared by any method known or hereafter developed in the art of pharmacology. In general, such preparatory methods include the step of bringing the active ingredient(s) into association with an excipient and/or one or more other accessory ingredients, and then, if necessary and/or desirable, shaping and/or packaging the product into a desired single- or multi-dose unit. Pharmaceutical formulations can additionally comprise a pharmaceutically acceptable excipient, which, as used herein, includes any and all solvents, dispersion media, diluents, or other liquid vehicles, dispersion or suspension aids, surface active agents, isotonic agents, thickening or emulsifying agents, preservatives, solid binders, lubricants and the like, as suited to the particular dosage form desired. Remington's The Science and Practice of Pharmacy, 21st Edition, A. R Gennaro (Lippincott, Williams & Wilkins, Baltimore, MD, 2006; incorporated in its entirety herein by reference) discloses various excipients used in formulating pharmaceutical compositions and known techniques for the preparation thereof. See also PCT application PCT/US2010/055131 (Publication number WO2011/053982 A8, filed Nov. 2, 2010), incorporated in its entirety herein by reference, for additional suitable methods, reagents, excipients and solvents for producing pharmaceutical compositions comprising a nuclease.

[0879] Except insofar as any conventional excipient medium is incompatible with a substance or its derivatives, such as by producing any undesirable biological effect or otherwise interacting in a deleterious manner with any other component(s) of the pharmaceutical composition, its use is contemplated to be within the scope of this disclosure.

[0880] The compositions, as described above, can be administered in effective amounts. The effective amount will depend upon the mode of administration, the particular condition being treated, and the desired outcome. It may also depend upon the stage of the condition, the age and physical condition of the subject, the nature of concurrent therapy, if any, and like factors well-known to the medical practitioner. For therapeutic applications, it is that amount sufficient to achieve a medically desirable result.

[0881] In some embodiments, compositions in accordance with the present disclosure can be used for treatment of any of a variety of diseases, disorders, and/or conditions.

### Methods of Treatment

[0882] Some aspects of the present invention provide methods of treating a subject in need, the method comprising administering to a subject in need an effective therapeutic amount of a pharmaceutical composition as described herein. In other embodiments, the methods of the invention comprise expressing or introducing into a cell a base editor polypeptide and one or more guide RNAs capable of targeting a nucleic acid molecule encoding at least one polypeptide.

[0883] In embodiments, the methods of treatment involve a pretreatment, co-treatment, or simultaneous treatment with an antiretroviral drug(s) (e.g., lamivudine) for treatment of a retroviral infection (e.g., an HBV infection). In embodiments, the treatment (e.g., pretreatment, co-treatment, or simultaneous treatment) has a duration of about or at least about 1, 2, 3, 4, 5, 6, 7, 8, 9, 10, 11, 12, 13, 14, 15, 16, 17, 18, 19, 20, 30, 40, 50, 60, 70, 80, 90, or 100 days. The treatment has a duration of no more than about 1, 2, 3, 4, 5, 6, 7, 8, 9, 10, 11, 12, 13, 14, 15, 16, 17, 18, 19, 20, 30, 40, 50, 60, 70, 80, 90, or 100 days. In embodiments, administration of the antiretroviral drug stops about or at least about 1, 2, 3, 4, 5, 6, 7, 8, 9, 10, 11, 12, 13, 14, 15, 16, 17, 18, 19, or 20 days prior to (i.e., “pretreatment”) administration of a base editing system to a subject or cell administered the pretreatment. In embodiments, administration of the antiretroviral drug stops nor more than about 1, 2, 3, 4, 5, 6, 7, 8, 9, 10, 11, 12, 13, 14, 15, 16, 17, 18, 19, or 20 days prior to administration of a base editing system to a subject or cell administered the pretreatment. In embodiments, administration of the antiretroviral drug begins about or at least about 1, 2, 3, 4, 5, 6, 7, 8, 9, 10, 11, 12, 13, 14, 15, 16, 17, 18, 19, or 20 days prior to administration of a base editing system to a subject or cell administered the pretreatment. In embodiments, administration of the antiretroviral drug ends nor more than about 1, 2, 3, 4, 5, 6, 7, 8, 9, 10, 11, 12, 13, 14, 15, 16, 17, 18, 19, or 20 days prior to administration of a base editing system to a subject or cell administered the pretreatment. In embodiments, administration of the antiretroviral drug ends no more than about 1, 2, 3, 4, 5, 6, 7, 8, 9, 10, 11, 12, 13, 14, 15, 16, 17, 18, 19, or 20 days following administration of a base editing system and treatment. In embodiments, the antiretroviral drug is first administered to a subject or cell about or at least about 0, 1, 2, 3, 4, 5, 6, 7, 8, 9, 10, 11, 12, 13, 14, 15, 16, 17, 18, 19, or 20 days prior to administration of a base editing system to the subject or cell and continues for about, at least about, or no more than about 0, 1, 2, 3, 4, 5, 6, 7, 8, 9, 10, 11, 12, 13, 14, 15, 16, 17, 18, 19, or 20 days following an administration of a base editing system, where in some instances the administration of the base editing system is a first administration of the base editing system.

[0884] Non-limiting examples of antiretroviral drugs include adefovir, tenofovir, telbivudine, interferons (e.g., Interferon alfa-2b (Intron A) or Interferon alpha-2a; pegylated interferons (e.g., peginterferon alpha-2a or peginterferon alpha-2b)), Lymphotoxin 0 receptor (LTBR), nucleoside/nucleotide reverse transcriptase inhibitors (NRTIs) (e.g., abacavir (Ziagen), Didanosine, emtricitabine (Emtriva), lamivudine (Epivir), Stavudine, tenofovir disoproxil fumarate (Viread), Tenofovir alafenamide, and zidovudine (Retrovir)), non-nucleoside reverse transcriptase inhibitors (NNRTIs) (e.g., Delavirdine, doravirine (Pifeltro), efavirenz (Sustiva), etravirine (Intelence), nevirapine (Viramune), rilpivirine (Edurant), and Delavirdine), post-attachment inhibitors or monoclonal antibodies (e.g., Ibalizumab-uiyk), CCR5 Antagonists (e.g., Maraviroc), Atazanavir, Darunavir, Cobicistat, Lopinavir, Maraviroc, Nevirapine, Rilpivirine, Elvitegravir+TDF+FTC+cobicistat, Elvitegravir+TAF+FTC+cobicistat, Integrase inhibitors (e.g., Bictegravir, Cabotegravir, Cabotegravir and rilpivirine, Dolutegravir, Elvitegravir, fosamprenavir (Lexiva, Telzir), and Raltegravir), Fusion inhibitors (e.g., Enfuvirtide), entry inhibitors (e.g., Maraviroc), protease inhibitors (PIs) (e.g., Atazanavir, Darunavir, Lopinavir, indinavir (Crixivan), lopinavir/ritonavir (Kaletra), ritonavir (Norvir), saquinavir (Invirase), and tipranavir (Aptivus)), attachment and post-attachment inhibitors (e.g., Fostemsavir, Ibalizumab), and Entecavir. In an embodiment, the antiretroviral drug is selected from one or more of Lamivudine; Entecavir; Tenofovir; Interferon; and Peg-Interferon.

[0885] In embodiments, pretreatment, co-treatment, or simultaneous treatment of a subject and/or cell with one or more of the antiretroviral drug(s) (e.g., in combination with a base editor system of the present disclosure) is associated with an increase in base editing efficiency of a target sequence(s) in a polynucleotide (e.g., in cccDNA) of about or at least about 1%, 2%, 3%, 4%, 5%, 10%, 15%, 20%, 25%, 30%, 35%, 40%, 45%, 50%, 55%, 60%, 65%, 70%, 75%, 80%, 85%, 90%, 95%, 100%, 150%, 200%, 300%, 400%, 500%, or more relative to a reference subject and/or cell not administered the antiretroviral drug.

[0886] One of ordinary skill in the art would recognize that multiple administrations of the pharmaceutical compositions contemplated in particular embodiments may be required to affect the desired therapy. For example, a composition may be administered to the subject 1, 2, 3, 4, 5, 6, 7, 8, 9, or 10 or more times over a span of 1 week, 2 weeks, 3 weeks, 1 month, 2 months, 3 months, 4 months, 5 months, 6 months, 1 year, 2 years, 5, years, 10 years, or more. In any of such methods, the methods may comprise administering to the subject an effective amount of an edited cell or a base editor system or polynucleotide encoding such system. In any of such methods, the methods may comprise administering one or more doses of an effective amount of a base editor system, optionally wherein the doses are separated by a period of about or at least about 1 hour, 12 hours, 1 day, 2 days, 3 days, 4 days, 5 days, 6 days, 7 days, 8 days, 9 days, 10 days, 11 days, 12 days, 13 days, 14 days, or more. In any of such methods, the methods may comprise administering two or more doses of an effective amount of a base editor system.

[0887] Administration of the pharmaceutical compositions contemplated herein may be carried out using conventional techniques including, but not limited to, infusion, transfusion, or parenterally. In some embodiments, parenteral administration includes infusing or injecting intravascularly, intravenously, intramuscularly, intraarterially, intrathecally, intratumorally, intradermally, intraperitoneally, transtracheally, subcutaneously, subcuticularly, intraarticularly, subcapsularly, subarachnoidly and intrasternally.

[0888] In some embodiments, a composition and/or agent described herein (e.g., edited cell, base editor system, and/or antiretroviral drug) is administered in a dosage that is about 0.5-30 mg per kilogram body weight of the human subject. In another embodiment, the amount of the composition administered is about 0.5-20 mg per kilogram body weight of the human subject. In another embodiment, the amount of the composition administered is about 0.5-10 mg per kilogram body weight of the human subject. In another embodiment, the amount of the composition administered is about 0.04 mg, about 0.08 mg, about 0.16 mg, about 0.32 mg, about 0.64 mg, about 1.25 mg, about 1.28 mg, about 1.92 mg, about 2.5 mg, about 3.56 mg, about 3.75 mg, about 5.0 mg, about 7.12 mg, about 7.5 mg, about 10 mg, about 14.24 mg, about 15 mg, about 20 mg, or about 30 mg per kilogram body weight of the human subject. In another embodiment, the amount of the compo composition und administered is about 1.92 mg, about 3.75 mg, about 7.5 mg, about 15.0 mg, or about 30.0 mg per kilogram body weight of the human subject and the composition is administered two times a week. In another embodiment, the amount of the composition administered is about 1.28 mg, about 2.56 mg, about 5.0 mg, about 10 mg, or about 20 mg per kilogram body weight of the human subject and the composition is administered two times a week. In another embodiment, the amount of the composition administered is about 1.92 mg, about 3.75 mg, about 7.5 mg, about 15.0 mg, or about 30.0 mg per kilogram body weight of the human subject and the composition is administered once a week. In another embodiment, the amount of the composition administered is about 1.28 mg, about 2.56 mg, about 5.0 mg, about 10 mg, or about 20 mg per kilogram body weight of the human subject and the composition is administered once a week. In another embodiment, the amount of the composition administered is about 1.92 mg, about 3.75 mg, about 7.5 mg, about 15.0 mg, or about 30.0 mg per kilogram body weight of the human subject and the composition is administered once a day three, five or seven times in a seven day period. In another embodiment, the composition is administered intravenously once a day, seven times in a seven day period. In another embodiment, the amount of the composition administered is about 1.28 mg, about 2.56 mg, about 5.0 mg, about 10 mg, or about 20 mg per kilogram body weight of the human subject and the composition is administered once a day three, five or seven times in a seven day period. In another embodiment, the composition is administered intravenously once a day, seven times in a seven day period.

[0889] In some embodiments, the composition is administered over a period of about, of at least about, or less than about, substantially instantaneously (e.g., over a period of less than 1 second, as may be the case when a composition is administered as an injection), 1 second, 10 seconds, 30 seconds, 1 minute, 0.1 h, 0.25 h, 0.5 h, 1 h, 2 h, 3 h, 4 h, 5 h, 6 h, 7 h, 8 h, 9 h, 10 h, 11 h, or 12 h. In another embodiment, the composition is administered over a period of 0.25-2 h. In another embodiment, the composition is gradually administered over a period of 1 h. In another embodiment, the composition is gradually administered over a period of 2 h.

### Methods of Treating HBV Infection

[0890] The present invention provides methods of treating an HBV infection or symptoms thereof that comprise administering to a subject (e.g., a mammal, such as a human) a therapeutically effective amount of a pharmaceutical composition that comprises a polynucleotide encoding a base editor system (e.g., base editor and gRNA) described herein.

[0891] In some embodiments, the base editor is a fusion protein that comprises a polynucleotide programmable DNA binding domain and an adenosine deaminase domain or a cytidine deaminase domain. A cell of the subject is transduced with the base editor and one or more guide polynucleotides that target the base editor to effect an A·T to G·C alteration (if the cell is transduced with an adenosine deaminase domain) or a C·G to U·A alteration (if the cell is transduced with a cytidine deaminase domain) of a nucleic acid sequence encoding an HBV polypeptide.

[0892] In some embodiments, treatment of chronic Hepatitis B includes a combination of approaches. For example, a subject infected with HBV can be administered a therapeutically effective amount of a pharmaceutical combination described above that targets and modifies HBV cccDNA. For example, a BE4 base editor without a UGI domain can be used with a gRNA targeting a region of the HBV genome. Without being bound by theory, omitting the inhibitor makes C->U deamination susceptible to uracil glycosylase which damages HBV cccDNA, thus destabilizing it. This treatment can be combined with a treatment that reduce or inhibit HBsAg expression (including from integrated HBV DNA), such as targeting the S or pol gene of the HBV genome using the base editors and guide RNAs described herein. Treatment can also comprise stimulating the immune system. In some embodiments, each of these three distinct therapeutic goals can be accomplished using the base editing reagents and techniques described herein.

[0893] The methods herein include administering to the subject (including a subject identified as in need of such treatment) an effective amount of a composition described herein. Identifying a subject in need of such treatment can be in the judgment of a subject or a health care professional and can be subjective (e.g. opinion) or objective (e.g. measurable by a test or diagnostic method).

[0894] The therapeutic methods of the invention in general comprise administration of a therapeutically effective amount of a pharmaceutical composition comprising, for example, a vector encoding a base editor and a gRNA that targets an HBV gene of interest to a subject (e.g., human) in need thereof. Such treatment will be suitably administered to subjects, particularly humans, suffering from, having, susceptible to, or at risk for HBV infection. The compositions herein may be also used in the treatment of any other disorders in which HBV infection may be implicated.

[0895] In one embodiment, the invention provides a method of monitoring treatment progress. The method includes the step of determining a level of diagnostic marker (Marker) (e.g., viral load) or diagnostic measurement (e.g., screen, assay) in a subject suffering from or susceptible to a disorder or symptoms thereof associated with HBV infection in which the subject has been administered a therapeutic amount of a composition herein sufficient to treat the disease or symptoms thereof. The level of Marker determined in the method can be compared to known levels of Marker in either healthy normal controls or in other afflicted patients to establish the subject's disease status. In preferred embodiments, a second level of Marker in the subject is determined at a time point later than the determination of the first level, and the two levels are compared to monitor the course of disease or the efficacy of the therapy. In certain preferred embodiments, a pre-treatment level of Marker in the subject is determined prior to beginning treatment according to this invention; this pre-treatment level of Marker can then be compared to the level of Marker in the subject after the treatment commences, to determine the efficacy of the treatment.

### Kits

[0896] The invention provides kits for the treatment of an HBV infection, as well as related diseases and disorders, including cirrhosis, hepatocellular carcinoma (HCC), and any other disease associated with or resulting from HBV infection, in a subject. In some embodiments, the kit further includes a base editor system or a polynucleotide encoding a base editor system, wherein the base editor polypeptide system a nucleic acid programmable DNA binding protein (napDNAbp), a deaminase, and a guide RNA. In some embodiments, the napDNAbp is Cas9 or Cas12. In some embodiments, the polynucleotide encoding the base editor is a mRNA sequence. In some embodiments, the deaminase is a cytidine deaminase or an adenosine deaminase. In some embodiments, the kit comprises an edited cell and instructions regarding the use of such cell.

[0897] The kits may further comprise written instructions for using the base editor system and/or edited cell. In other embodiments, the instructions include at least one of the following: precautions; warnings; clinical studies; and/or references. The instructions may be printed directly on the container (when present), or as a label applied to the container, or as a separate sheet, pamphlet, card, or folder supplied in or with the container. In a further embodiment, a kit can comprise instructions in the form of a label or separate insert (package insert) for suitable operational parameters. In yet another embodiment, the kit can comprise one or more containers with appropriate positive and negative controls or control samples, to be used as standard(s) for detection, calibration, or normalization. The kit can further comprise a second container comprising a pharmaceutically-acceptable buffer, such as (sterile) phosphate-buffered saline, Ringer's solution, or dextrose solution. It can further include other materials desirable from a commercial and user standpoint, including other buffers, diluents, filters, needles, syringes, and package inserts with instructions for use.

[0898] The practice of the present invention employs, unless otherwise indicated, conventional techniques of molecular biology (including recombinant techniques), microbiology, cell biology, biochemistry and immunology, which are well within the purview of the skilled artisan. Such techniques are explained fully in the literature, such as, “Molecular Cloning: A Laboratory Manual”, second edition (Sambrook, 1989); “Oligonucleotide Synthesis” (Gait, 1984); “Animal Cell Culture” (Freshney, 1987); “Methods in Enzymology” “Handbook of Experimental Immunology” (Weir, 1996); “Gene Transfer Vectors for Mammalian Cells” (Miller and Calos, 1987); “Current Protocols in Molecular Biology” (Ausubel, 1987); “PCR: The Polymerase Chain Reaction”, (Mullis, 1994); “Current Protocols in Immunology” (Coligan, 1991). These techniques are applicable to the production of the polynucleotides and polypeptides of the invention, and, as such, may be considered in making and practicing the invention. Particularly useful techniques for particular embodiments will be discussed in the sections that follow.

[0899] The following examples are put forth so as to provide those of ordinary skill in the art with a complete disclosure and description of how to make and use the assay, screening, and therapeutic methods of the invention, and are not intended to limit the scope of what the inventors regard as their invention.

### EXAMPLES

### Example 1: Targeted Base Editing of the HBV Genome Resulted in Missense Mutations or Alterations in Transcription Start Sites in the HBV Genome

[0900] Guide RNAs (see Tables 1 and 2) were designed in silico to target a Cas12b-ABE base editor to introduce missense mutations or transcription site nucleobase alterations at conserved regions of HBV genes (see Table 20A). HBV Genotype D, subgenotype ayw, was analyzed using a CRISPR design tool available on Benchling Software to identify potential guide RNAs, and the level of sequence conservation across all HBV genotypes was determined for each guide RNA. 13 guide RNAs were selected for testing (Tables 1 and 2). These guide RNAs were adjacent or in proximity to RTTN PAM sequences. For purposes of comparison, additional base editor systems indicated in FIG. 4 were evaluated. The additional base editor systems contained NGG-ABE8.8-m, Cas12b-ABE, VRQR-ABE, or NGC-ABE base editors and guide RNAs listed in Table 1. Conservation across HBV genomes of the sequences targeted by these additional base editor systems as well as the functional changes resulting from base edits effected by the additional base editors are provided below in Tables 20B and 20C.

[0901] The gRNAs were selected based on the high conservation across HBV genotypes, with a focus on genotypes D and A. Such a design strategy targeting highly conserved regions allowed for the design of gRNAs suitable for targeting a wider patient population and that avoid the appearance of viral mutations that would enable HBV virus to escape base editing treatment.

[0902] A selection criterion used in the design of the gRNAs for introducing missense mutations was the ability to generate edits in the HBV genome that would lead to a missense mutation. Further, an in silico analysis of the amino acid changes generated by the base editing reagents, and gRNAs were selected that would generate missense amino acid changes with sequences rarely detected in naturally occurring HBV genomes (<0.05% frequency of amino acid change). This strategy increased the likelihood that a gRNA would introduce a mutation leading to a disruption of the HBV protein/genome.

TABLE 20A
Conservation across HBV genomes of
sequences targeted by guide RNAs.

| | | Conservation of |
|---|---|---|
| | HBV | target site across |
| | gene | HBV genotypes |
| Guide ID | targeted | A-H |
| cas12b-4 | Pol/S | >90% A,C,D,G |
| cas12b-5 | Pol/S | >85% A, B, D |
| cas12b-11 | Pol/S | >90% A, D, G, H |
| cas12b-17 | Pol/S | >60% A, D |
| cas12b-30 | Pol | >90% all genotypes |
| cas12b-42 | Core | >65% A,D,E |
| cas12b-100 | Pol | >80% A,B,C,D,E |
| cas12b-147 | Pol/S | >75% A,B,D, E |
| cas12b-154 | Pol/S | >80% A-E, G |

TABLE 20B
Conservation across HBV genomes of sequences targeted by guide RNAs, editing efficiencies
associated with the guide RNAs, and functional changes associated with genome
alterations effected by base editing systems containing the guide RNAs

| | | | | % | | |
|---|---|---|---|---|---|---|
| | Base | | | Editing | Conservation across | |
| Guide ID | Editor | PAM | HBV gene | average | HBV genomes | Functional Change |
| cas12b-152 | Cas12b- | ATTG | S/Pol | 54% | >90% in all genotypes | missense mutations in |
| | ABE | | | | | both S and Pol |
| ABE-41* | Abe7.10 | NGG | S/Pol | 58% | >90% in all genotypes | missense mutations in |
| | | | | | | both S and Pol |
| ABE-85* | Abe7.10 | NGG | S/Pol | 60% | >90% in all genotypes | missense mutations in |
| | | | | | | both S and Pol |
| ABE-133* | VRQR- | NGA | S | 65% | >90% in all genotypes | missense mutations in S |
| | ABE | | | | | |
| MSPbeam94* | Abe7.10 | NGG | S/Pol | 73% | >90% in all genotypes | active site of the pol, |
| | | | | | | missense in S |
| G-polyA- | NGC- | NGC | polyA | 75% | ~50% in genotypes | |
| NGC1 | ABE | | | | A, D | |
| G-polyA- | NGC- | NGC | polyA | 67% | ~9% in genotype D | |
| NGC2 | ABE | | | | | |
| G-251 | Abe7.10 | NGG | Enhancer I | 77% | >50% in genotypes D, | targeting cccDNA |
| | | | | | E | transcription Enhancer 1 |
| G-159 | Abe7.10 | NGG | Enhancer I | 51% | >90% in genotypes A, | targeting cccDNA |
| | | | | | D, E, G | transcription Enhancer 1 |
| G-553 | ABE8.8-m | NGG | Enhancer I | 64% | ~70% in genotypes D, | targeting cccDNA |
| | | | | | E | transcription Enhancer 1 |
| G-845 | Abe7.10 | NGG | Enhancer IIb | 70% | >90% in genotypes | targeting cccDNA |
| | | | | | B, C D, E | transcription Enhancer IIb |
| G-200 | ABE8.8-m | NGG | HBX | 59% | >90% in genotypes B-F | targeting HBX promoter |
| | | | promoter | | | |
| G-772 | Abe7.10 | NGG | S promoter | 66% | ~15% in genotype D | targeting S promoter |
| G-474 | VRQR-ABE | NGA | Basal Core | 74% | ~20% in genotype D, | targeting basal core |
| | | | | | >60% genotype E | promoter |

TABLE 20C
Conservation across HBV genomes of
sequences targeted by guide RNAs.

| | | | | Conservation |
|---|---|---|---|---|
| | | | HBV | across HBV |
| Guide ID | Base Editor | PAM | gene | genotypes A-H |
| ABE-8* | VRQR-ABE | NGA | S | 97% |
| ABE-41* | ABE7.10/ABE8 | NGG | Pol/S | 99% |
| ABE-85 | ABE7.10/ABE8 | NGG | Pol/S | 92% |
| (MSPbeam36)* | | | | |
| ABE-131 (EMS11)* | VRQR-ABE | NGA | Core | 98% |
| ABE-133* | VRQR-ABE | NGA | S | 99% |
| ABE-142 | VRQR-ABE | NGA | Pol/S | 99% |
| (MSPbeam66)* | | | | |
| ABE-150* | ABE7.10/ABE8 | NGG | Pol/X | 98% |
| ABE-235 (EMS21)* | ABE7.10/ABE8 | NGG | Pol/S | 96% |
| cas12b-116 | Cas12b-ABE | ATTC | Pol/X | >75% A, B, D, |
| | | | | F |
| cas12b-122 | Cas12b-ABE | GTTG | Pol | >85% A, B, D, |
| | | | | F, G |
| cas12b-148 | Cas12b-ABE | GTTG | Pol/S | >90% A, D |
| cas12b-152 | Cas12b-ABE | ATTG | Pol/S | >85% all |
| | | | | genotypes |

[0903] Gene editing efficiency was evaluated as follows. For plasmid transfections, a vector encoding guide RNA and a vector encoding a base editor were transiently transfected into HEK293T cells previously transduced with a lentiviral vector comprising the HBV genome (i.e., a Hek293-lentiHBV system). The base editor was Cas12b-ABE (bhCas12b-ABE8.13 D95A,_S893R,__KK46R,_E837G).

[0904] Transfection was carried out using a high efficiency, low toxicity DNA transfection reagent (Mirus TransIT293 or Lipofectamiine 2000) optimized for Hek293 cells in a 3:1 ratio using 250 ng of gRNA plasmid and 750 ng of base editor plasmid. After four days for plasmid transfections, genomic DNA was extracted with a simple lysis buffer of 0.05% SDS, 25 μg/ml proteinase K, and 10 mM Tris pH 8.0, followed by heat inactivation at 85° C. Genomic sites were PCR amplified and sequenced on a MiSeq. Editing efficiencies determined for each gRNA are presented in Table 21 below and in FIG. 4.

TABLE 21
Base editing efficiencies.

| | Editing | Editing | Editing | Average |
|---|---|---|---|---|
| | Efficiency | Efficiency | Efficiency | Editing |
| Guide ID | 1 (%) | 2 (%) | 3 (%) | Efficiency (%) |
| cas12b-4 | 14.70 | 26.37 | 18.93 | 20.00 |
| cas12b-5 | 0.12 | 0.36 | 1.14 | 0.54 |
| cas12b-11 | 44.34 | 60.28 | 69.47 | 58.03 |
| cas12b-17 | 26.42 | 34.50 | 44.29 | 35.07 |
| cas12b-30 | 0.02 | 0.02 | 0.01 | 0.02 |
| cas12b-42 | 29.48 | 23.94 | 33.54 | 28.99 |
| cas12b-100 | 7.97 | 4.21 | 3.35 | 5.18 |
| cas12b-147 | 13.02 | 4.44 | 15.03 | 10.83 |
| cas12b-154 | 16.12 | 30.06 | 37.02 | 27.74 |
| cas12b-35 | 0.31 | 0.04 | 0.70 | 0.35 |
| cas12b-124 | 29.50 | 11.78 | 11.15 | 17.47 |
| cas12b-127 | 50.16 | 37.40 | 39.21 | 42.25 |
| cas12b- | 8.22 | 3.91 | 4.39 | 5.51 |
| 122b | | | | |

[0905] The guides cas12b-4, cas12b-5, cas12b-11, cas12b-17, cas12b-30, cas12b-42, cas12b-100, cas12b-147, and cas12b-154 targeted the base editor to introduce missense mutations into their respective target sequences (see Table 2A). The guide cas12b-35 targeted the base editor to introduced a nucleobase alteration in enhancer II box A. The guides cas12b-124 and cas12b-127 each targeted the base editor to introduce a nucleobase alteration in enhancer I. The guide cas12b-122b targeted the base editor to introduce a nucleobase alteration in the HBX promoter.

### Example 2: Antiviral and Editing Efficacy of Base Editor Systems

[0906] Base editor systems comparing guide RNAs evaluated in Example 1 were subsequently tested for anti-viral and editing efficacy using the Hepatitis B virus-primary human hepatocyte (HBV-PHH) system. Cells were transfected with the guide RNAs and mRNAs encoding the base editor as described in Example 1. It was determined (FIGS. 5A-5C and Table 22) that base editor systems comprising ABE-133, ABE-41, MSPbeam94, ABE-85, PolyA-NGC1, PolyA-NGC2, Cas12b-11, and/or Cas12b-152 guide RNA effectively edited covalently-closed circular HBV DNA (cccDNA) and/or reduced viral replication in the HBV-PHH system, as indicated by a robust reduction in all HBV markers relative to the no treatment control. Guide RNAs ABE-133, MSPbeam94, and ABE-85 were associated with a 70-80% reduction of HBV DNA as compared to controls. The guide RNAs PolyA-NGC1 and PolyA-NGC2 were associated with high editing followed by 90% efficacy in reduction of HbeAg.

TABLE 22
Base editing efficiencies associated with the indicated guide RNAs

| | cccDNA |
|---|---|
| | Editing in |
| gRNA | PHH A > G % |
| ABE-133 | 76.0% |
| ABE-41 | 56.0% |
| MSPbeam94 | 41.0% |
| ABE-85 | 29.0% |
| PolyA-NGC1 | 60.4% |
| PolyA-NGC2 | 62.9% |

[0907] The HBV-PHH system for studying the Hepatitis B virus is described, for example, by Winer, et al., “Long-term hepatitis B infection in a scalable hepatic co-culture system,” Nat. Commun. 8:125 (2017) and by Zhou, et al. “Long-term maintenance of human fetal hepatocytes and prolonged susceptibility to HBV infection by co-culture with non-parenchymal cells,” J. Virol Methods, 195:185-93 (2014); and is provided commercially by ImQuest BioSciences (imquestbio.com/programs/virology/hbv/)).

### Example 3: Multiplexing gRNAs Reduced HBV Viral Parameters in HepG2-NTCP Cells

[0908] Experiments were completed using guide RNA's listed in Table 1 to identify combinations of guide RNA's effective in treating HBV-infected cells. HepG2-NTCP cells were transfected with mRNA encoding BE4 and a guide RNA(s) selected from gRNA12, gRNA37, gRNA19, gRNA190, and gRNA40. HepG2-NTCP cells are described in Sun, et al. “NTCP-Reconstituted In Vitro HBV Infection System,” Methods Mol. Biol. 1540:1-14 (2017), DOI: 10.1007/978-1-4939-6700-1_1, the disclosure of which is incorporated herein by reference in its entirety for all purposes. Cells were infected at day 0 with HBV and then transfected with the mRNA and gRNA(s) at day 4, see FIG. 6. Measurements of HBsAg, HBeAg, total HBV DNA, and 3.5 kb viral DNA were taken at day 14, see FIG. 6. The guide RNA, gRNA37, targeted HBsAg and gRNA40 targeted the HBV core protein, see FIG. 7. The use of gRNA37 was associated with a reduction in HBsAg levels and the use of gRNA40 was associated with a reduction in HBeAg levels, see FIG. 8. Also, each of gRNA37 and gRNA40 was associated with a lowering of total HBV DNA and 3.5 kb RNA levels. As shown in FIG. 8, guide RNAs gRNA37 and gRNA40 were identified as particularly effective gRNAs.

[0909] Having identified gRNA37 and gRNA40 as effective gRNAs, the antiviral efficacy of a base editor system containing BE4, gRNA37 and gRNA40 (i.e., multiplexing gRNAs) was evaluated, FIGS. 8-10. It was determined that the base editor system multiplexed with the two gRNAs was associated with a reduction of HBV viral parameters in HepG2-NTCP cells, see FIG. 9. As demonstrated in FIG. 10, the base editor system functioned through cccDNA editing, without reducing cccDNA level, and the base editor system (which contained gRNA37 and gRNA40) was associated with robust cccDNA editing (about 38% for gRNA37 and about 60% for gRNA40). For the evaluation of editing of cccDNA, the cccDNA was enriched via Hirt extraction and ExoI/ExoIII nuclease treatment to remove rcDNA (relaxed circular DNA). Throughout the Examples provided herein, editing of cccDNA was evaluated using next generation sequencing completed using cccDNA enriched in this way. Thus, it was demonstrated that it is advantageous in terms of observed antiviral effect to administer multiple distinct gRNA molecules (e.g., gRNA37 and gRNA40) in combination with a base editor (e.g., BE4) to modify the HBV genome.

### Example 4: Antiviral Efficacy of Base Editing in Combination with Lamivudine Treatment

[0910] Experiments were undertaken to determine whether there may be any advantage to combining the base editor systems described herein with an antiviral medication (specifically, an antiretroviral medication), such as lamivudine.

[0911] First, experiments were carried out as described in the schematic provided in FIG. 11. HepG2-NTCP cells were infected with HBV at day 0, at day 4 an 8-day treatment with lamivudine commenced (which included a 3-day pretreatment period within the 8-day total), at day 7 cells were transfected with mRNA encoding BE4 and gRNAs 37 and 40, and measurements were taken at day 15. As shown in FIGS. 12 and 13, it was found that the 3-day pretreatment (8-day total treatment duration) with lamivudine was associated with an improvement in base editing of about 20% (FIG. 12). Not being bound by theory, pretreatment with lamivudine removes intermediate HBV DNA species, leaving only cccDNA. This improvement was further associated with high antiviral efficacy in the HepG2-NTCP cells. Not being bound by theory, high covalently-closed circular DNA (cccDNA) editing in lamivudine pretreated conditions is consistent with the base editor system directly targeting cccDNA. Treatment with the combination of gRNA38 and gRNA40 lead to a robust reduction of HBV viral markers (FIG. 13).

### Example 5: The Base Editors are More Effective than an Antiviral Medication

[0912] Given that HBV infections can be treated using antiretroviral medications, such as lamivudine, experiments were undertaken to determine the efficacy of the base editor systems relative to treatment with lamivudine.

[0913] The design of the experiments is described schematically in FIG. 14. Primary human hepatocyte (PHH) cells were infected with HBV at day 0. At days 4 and 11, the cells were transfected with mRNA encoding BE4 and with gRNA37 and gRNA40. Measurements of HBV DNA were taken over time, and measurements of HBsAg, HBeAG, HBV total DNA, 3.5 kb RNA, and cccDNA editing were taken at day 25. The experiments were carried out using a PHH co-culture system available from PhoenixBio. The PHH co-culture system maintained hepatocyte differentiation and metabolic activity for over 30 days. The HBV infection in the cells was persistent and a cccDNA level was maintained.

[0914] As shown in FIG. 16, HBV rebounded after discontinuation of lamivudine, but HBV did not rebound for at least 2 weeks after the second transduction with base editing reagents. Further, cells transfected with the base editor system showed a reduction in all HBV markers by between about 70% and about 80% at day 25, see FIG. 15. Thus, the base editor system containing BE4 and the two guide RNAs (gRNA37 and gRNA40) was more effective in controlling the HBV infection than treatment with an antiretroviral medication.

[0915] Further, the base editor system was associated with an editing efficiency of about 30% at the S antigen site and about 60% at the PreCore gene site, see FIG. 17. These editing levels are sufficient to enable high antiviral efficacy and prevent rebound of HBV in primary human hepatocyte (PHH) cells.

[0916] Cytosine base editing resulted in gRNA-specific reductions of HBV viral markers in relevant in vitro systems. Multiplex editing led to a simultaneous reduction of HBsAg, HBeAg, HBV DNA, and 3.5 kb RNA in HepG2-NTCP cells and primary hepatocytes. Not being bound by theory, the reduction in viral markers was likely driven by base editing of cccDNA, but not a reduction in cccDNA levels. Combined treatment of cells with the base editing reagents and standard antiviral lamivudine resulted in higher base editing efficiencies. Base editing was associated with the prevention of HBV rebound in infected primary hepatocytes. Not being bound by theory, cytosine base editing introduced permanent mutations in cccDNA preventing HBV rebound in clinically relevant in vitro models.

### Example 6: Influence of Lamivudine on Base Editing Efficiency in Primary Hepatocytes

[0917] Experiments were undertaken to further investigate the influence of the antiretroviral drug lamivudine on base editing using base editing systems containing BE4 and gRNAs 37 and 40.

[0918] The design of the experiments is described schematically in FIG. 18. Primary human hepatocyte (PHH) cells were infected with HBV at day 0, at day 4 an 8-day. Treatment with lamivudine commenced (which included a 3-day pretreatment period within the 8-day total), and cells were transfected with mRNA encoding BE4 and the gRNAs gRNA37 and gRNA40 at days 7 and 14. HBV DNA levels were measured over time, and additional HBV markers were measured at day 21.

[0919] Pretreatment with lamivudine improved editing in primary hepatocytes, see FIGS. 19 and 20. Combined treatment with lamivudine and the base editor system prevented HBV rebound, see FIG. 19. As shown in FIG. 21, the combined treatment and administration of the base editor system alone both resulted in a reduction in HBV markers by between about 70% and 80% at day 21.

### Example 7: Base Editing Efficiency and Antiviral Efficacy of Base Editors with Reduced Off-Target Activity

[0920] It may be advantageous to use base editors that have reduced off-target activity and lower non-specific effects (e.g., as compared to BE4) without compromising editing efficiencies. Thus, experiments were undertaken to evaluate the antiviral efficacy of base editor systems containing ppApo or rrA3F, which are described in Yu, et al. “Cytoxine base editors with minimized unguided DNA and RNA off-target events and high on-target activity,” Nature Communications, 11:2052 (2020), DOI: 10.1038/s41467-020-15887-5, the disclosure of which is incorporated herein by reference in its entirety for all purposes.

[0921] It was found, as shown in FIGS. 22 and 23, that base editor systems containing BE4, ppApo, or rrA3F and gRNA37 and gRNA40 had comparable editing efficiencies and were associated with reductions in the HBV marker HBsAg.

### Example 8: Cytosine Base Editing Inhibited Hepatitis B Virus Replication and Reduced HBsAg Expression In Vitro and In Vivo

[0922] A base editing strategy was devised to introduce stop codons in HBV genes (e.g., HBs, and Precore) using two distinct gRNAs. The antiviral efficacy of this approach was assessed in vitro in two different HBV-infected cell models: HepG2-NTCP and primary human hepatocytes. HepG2-NTCP and primary human hepatocytes were transfected with an mRNA encoding CBE BE4 and with gRNA37 and gRNA40. This transfection resulted in robust cccDNA editing (e.g., up to 50% editing in a gene encoding the Hepatitis B surface antigen (HBsAg) and up to 80% editing in the Precore gene), leading to a reduction in the encoded viral markers. Transfection with CBE mRNA and both gRNAs led to a sustained reduction in each of the following: HBsAg, HBeAg, which is an HBV viral protein, 3.5 kb viral RNA, and total intracellular HBV DNA. This significant reduction in HBsAg, HBeAg, 3.5 kb viral RNA, and total intracellular HBV DNA was observed when the CBE and gRNAs were administered as a single treatment and when they were used in combination with nucleoside analogs.

[0923] Having established the efficacy of these base editing reagents in vitro, experiments were then undertaken to evaluate these same base editing reagents for antiviral efficacy in vivo using the HBV minicircle mouse model. This in vivo model exhibits persistent HBV replication and antigen expression resulting from hydrodynamic injection with cccDNA-like plasmid. After establishing HBV viral replication, hepatic delivery of the base editing reagents was achieved via systemic administration of lipid nanoparticles (LNPs) formulated with the following base editing reagents: CBE mRNA and HBV-targeting gRNAs (e.g., gRNA37 and gRNA40 (see Table 1)). The mice were administered a combination of base editors, where the combination was either gRNA37 and gRNA40 or gRNA37-HM and gRNA40-HM. The guides gRNA37-HM and gRNA40-HM each included heavily modified(HM) scafolds (see Table 1).

[0924] Intravenous injection of the lipid nanoparticles (LNPs) containing the base editing reagents resulted in a significant reduction in mouse serum HBV DNA, HBsAg and HBeAg. This reduction was more pronounced when a first injection was given and a second injection was given two weeks later (FIGS. 24A-24C and 25A-25C). Two injections of BE4/gRNA(37+40) LNP at 2 mg/kg led to an approximately 2 log reduction in HBsAg and HBV DNA in the mouse serum, and undetectable levels of HBeAg. It was also found that it was beneficial to administer guide RNAs with heavily modified scaffolds (see, e.g., FIG. 25A). Mice administered BE4/gRNA(37+40)-HM (Heavy mod. gRNA) at days 1 and 14 also showed an approximately 2 log reduction in HBsAg as compared to controls. All single-dose (i.e., only at D1) and double-dose (i.e., at D1 and D14) treatments with the base editing reagents led to reductions in HBeAg to levels below detection after 2 weeks. Mice treated with either Entecavir or the base editing reagents showed a-2 log reduction in serum levels of HBV DNA at day 21.

[0925] Table 23 below provides a summary of the experimental design used to evaluate the base editing reagents in vivo. The mice contained an HBVcircle polynucleotide that enabled HBV replication in vivo. See, for example Yan et al., J. Hepatol 2017 66:1149-1157 for a description of an exemplary mouse model. The mice were administered lipid nanoparticles (BL4 LNP) containing mRNA encoding BE4 (a cytidine base editor) and either the guide RNAs gRNA37 and gRNA40 or the guide RNAs gRNA37-HM and gRNA-40-HM containing a scaffold with heavy modifications (HM). Efficacy of treatment using the base editing reagents was compared to efficacy of treatment using Entecavir. The mice were administered Entecavir daily on days 1 through day 14, or the mice were administered the base editing reagents either once on only day 1 or twice with the first administration being on day 1 and the second administration being on day 14. Entecavir (ETV) was administered orally. HBsAg, HbeAg, and HBV DNA levels in serum were measured weekly (FIGS. 24A-24C and 25A-25C).

TABLE 23
Experimental design for evaluating base editing reagents in vivo.

| | Number | Drug/LNP | Base editor | Dose | |
|---|---|---|---|---|---|
| Group | of Mice | Formulation | (BE)/gRNA | (RNA, mg/kg) | Schedule |
| 1 | 5 | — | — | — | |
| 2 | 5 | ETV | | 0.03 mg/kg | D 1-D 14 |
| 3 | 5 | BL4 LNP | BE4/mus.PCSK9 | 2 mg/kg | D 1 |
| | | | (control) | | |
| 4 | 5 | BL4 LNP | BE4/mus.PCSK9 | 2 mg/kg × 2 | D 1, D 14 |
| | | | (control) | | |
| 5 | 5 | BL4 LNP | BE4/gRNA(37 + 40) | 2 mg/kg | D 1 |
| 6 | 5 | BL4 LNP | BE4/gRNA(37 + 40) | 2 mg/kg × 2 | D 1, D 14 |
| 7 | 5 | BL4 LNP | BE4/gRNA(37 + 40) − | 2 mg/kg | D 1 |
| | | | HM | | |
| 8 | 5 | BL4 LNP | BE4/gRNA(37 + 40) − | 2 mg/kg × 2 | D 1, D 14 |
| | | | HM | | |

“LNP” indicates “lipid nanoparticle,” group 1 corresponded to untreated mice, “D 1” indicates “day 1,” “D 14”indicates “day 14,” “Schedule” indicates days of administration, “ETV” indicates “Entecavir,” “BE” indicates “base editor,” “×2” indicates administration at two different days (i.e., D 1 and D 14), “gRNA(37 + 40)” indicates a combination of gRNA37 and gRNA40, “gRNA(37 − 40) − HM” indicates a combination of gRNA37 − HM and gRNA − 40 − HM, and BL4 indicates a lipid nanoparticle formulation. As a negative control, a guide targeting mouse PCSK9 (mus.PCSK9) was used.

[0926] In sum, the data indicate that base editing can inactivate cccDNA by introducing mutations abrogating HBV replication and silencing viral protein expression.

### Example 9: Functional Inactivation of Hepatitis B Virus Genomic Reservoir by Cytosine Base Editing

[0927] gRNAs targeting conserved regions of the HBV genome were designed, and screened (FIGS. 26A and 26B). Interestingly, base editing with BE4 and the following gRNAs:

gRNA S1 (gRNA H) protospacer:
GAAAGCCCAGGATGATGGGA
gRNA C2 (gRNA B) protospacer:
CCATGCCCCAAAGCCACCCA
gRNA EMSbeam12 protospacer:
GACTTCTCTCAATTTTCTAG

prevented HBV rebound in primary human hepatocytes (FIG. 27A-D). Multiplexing two gRNAs introducing stop codons with CBE reduced HBsAg, HBeAg, HBV DNA, and 3.5 kb RNA in HepG2-NTCP (FIG. 28A-D) and in primary human hepatocytes. Base editing reduced HBs from naturally integrated HBB (FIG. 29A-C). Without intending to be bound by theory, a reduction in viral markers is likely driven by base editing of cccDNA without affecting cccDNA levels. As shown in FIG. 30A-C, base editing strongly reduced HBs from naturally integrated HBV. Combinatorial treatment of the base editing reagents with standard antiviral 3TC (lamivudine) resulted in higher detection of base editing efficiency.

### Example 10: Cytosine Base Editing Inhibited Hepatitis B Virus Replication and Reduced HBsAg Expression In Vitro and In Vivo

[0928] Multiplexing the gRNAs of Example 9 with a BE4 base editor simultaneously reduced HBV viral parameters in HepG2-NTCP (FIG. 31A-E). Base editors function through cccDNA editing, without reducing cccDNA level. Base editing prevented viral rebound in Primary Human Hepatocytes (PHH) (FIG. 32A-C).

[0929] Lipid nanoparticle-mediated delivery of BE4 mRNA and gRNAs S1/C2 lead to a sustained reduction of viral markers in an HBV minicircle murine model (FIG. 33A-C). An HBV minicircle mouse model supports durable production of HBV-like viral particles and HBV antigen expression in immunocompetent mice. Four weeks after a hydrodynamic injection with a cccDNA-like minicircle plasmid, mice received one or two doses (2×) of the base editing reagents (mRNA & gRNA formulated into a lipid nanoparticle (LNP), at 2 mg/kg). Entecavir (ETV) treated mice received antiviral at 0.03 mg/kg orally for two weeks, then the treatment was discontinued.

[0930] In sum, multiplexing two gRNAs introducing stop codons in HBV genes HBs and Precore with CBE lead to a simultaneous reduction of HBsAg, HBeAg, HBV DNA, and 3.5 kb RNA in HepG2-NTCP and human primary hepatocytes. Without intending to be bound by theory, a reduction in viral markers is likely to be driven by base editing of cccDNA, but not a reduction in cccDNA levels.

[0931] In vivo proof-of-concept in an HBV minicircle mouse model: IV injection(s) with LNP formulated with HBV targeting base editors at 2 mg/kg lead to a sustained reduction in HBsAg, with several mice showing loss in HBsAg, as well as reduction of HBeAg and serum HBV DNA. Combined, the data indicated that base editing can inactivate cccDNA by introducing mutations_abrogating HBV replication and silencing viral protein expression (FIG. 29).

[0932] BE4 in combination with gRNA EMSbeam12 and MSPbeam37-PLC edited the naturally integrated HBV genome present in the Alexander hepatoma cell line, PLC/PRF/5 (FIG. 34A). This editing reduced HBsAg secretion (FIG. 34B).

[0933] The following methods were used in the above examples.

### Primary Human Hepatocytes System for Studying HBV Infections

[0934] Primary hepatocytes (PHH) co-cultures infected with HBV were used to test antiviral efficacy of base editing systems. Primary hepatocyte co-culture (PHH) infected with HBV virus is a clinically relevant system for assessing anti-viral activity of base editing systems. The base editing reagents (mRNA encoding a base editor(s) and synthetic gRNA) were transfected via lipofection twice over the course of two weeks. The first transfection was performed about 3, 4, or 7 days after infection (days post infection (dpi)). Not being bound by theory, this 3-to-7-day period ensured that the cccDNA was completely formed at the time of the transfection. The second transfection was at about 7, 10, 11, or 14 days after infection. Extracellular parameters (e.g., HBsAg, HBeAg, and HBV DNA) were monitored over the course of the experiment (including the end of the experiment) and intracellular parameters (HBV DNA, viral RNA, and editing) were measured at the end of the experiment. Cells were lysed at the termination of the experiment (e.g., at 15, 17, 21, or 25 days).

[0935] Transfection details: RNA format, 800 ng total RNA per well in a 24 well plate (600 ng base editor-encoding mRNA+200 ng gRNA) transfected via lipofection (lipofectamin messengerMax, thermofisher Scientific) according to the vendor protocol.

### Example 11: Cytosine Base Editing of the Hepatoma Cell Line HepG2.2.15 In Vitro with and without Pretreatment with Lamivudine (LAM) Reduced Levels of HBsAg and HBeAg

[0936] Experiments were undertaken to evaluate base editing in vitro of the hepatoma cell line HepG2.2.15 with and without pre-treatment with lamivudine (LAM). The HepG2.2.15 cells were base edited and polypeptide expression was subsequently evaluated according to the experimental scheme shown in FIG. 35. Cells were seeded at day 0 (DO). At day 1 (D1), LAM pretreatments were initiated for cells pre-treated with LAM. At day 4 (D4) cells were transferred to new wells with or without LAM. At day 5 (D5) cells were transfected with mRNA encoding a BE4 base editor and one or more of the guide polynucleotides gRNA12 (EMSbeam12 targeting the HBs gene), gRNA37 (MSPbeam37 targeting the HBs gene), and gRNA40 (MSPbeam40 targeting the gene encoding HBeAg) (FIGS. 36A and 36B). The growth medium was replaced at day 8 (D8). At day 11 (D11 and 6 days post-transduction) culture supernatants were collected for analysis using an enzyme-linked immunosorbent assay to measure levels of expression for HBsAg and HBeAg. Robust reduction in HBsAg expression was observed for cells edited using the guide gRNA37 or gRNA12 targeting the HBs gene, and robust reduction in HBeAg expression was observed for cells edited using the guide gRNA40 targeting the gene encoding HBeAg. Cells edited using both gRNA40 and gRNA37 showed reduced expression of both HBsAg and HBeAg.

### OTHER EMBODIMENTS

[0937] From the foregoing description, it will be apparent that variations and modifications may be made to the invention described herein to adopt it to various usages and conditions. Such embodiments are also within the scope of the following claims.

[0938] The recitation of a listing of elements in any definition of a variable herein includes definitions of that variable as any single element or combination (or subcombination) of listed elements. The recitation of an embodiment herein includes that embodiment as any single embodiment or in combination with any other embodiments or portions thereof.

[0939] All patents and publications mentioned in this specification are herein incorporated by reference to the same extent as if each independent patent and publication was specifically and individually indicated to be incorporated by reference. The present disclosure may be related to PCT/US20/32226, the disclosure of which is incorporated herein by reference in its entirety for all purposes.

What is claimed is:

1. A method of editing a nucleobase of a hepatitis B virus (HBV) genome, the method comprising contacting the HBV genome with one or more guide RNAs and a base editor comprising a polynucleotide programmable DNA binding domain and an adenosine deaminase, wherein said guide RNA targets said base editor to effect an alteration of the nucleobase of the HBV genome, and wherein said one or more guide RNAs comprise a nucleotide sequence, from 5′ to 3′, or a 1, 2, 3, 4, or 5 nucleotide 5′ and/or 3′ truncation fragment thereof, selected from one or more of ACAAGAAUCCUCACAAUACC (SEQ ID NO:
(SEQ ID NO: 405)
ACAAGAAUCCUCACAAUACC,
(SEQ ID NO: 406)
UCGCUGGAUGUGUCUGCGGC,
(SEQ ID NO: 407)
CACCUGUAUUCCCAUCCCAU,
(SEQ ID NO: 408)
GGGGCCAAGUCUGUACAGCA,
(SEQ ID NO: 409)
GCUGACGCAACCCCCACUGG,
(SEQ ID NO: 410)
GGAGCUACUGUGGAGUUACU,
(SEQ ID NO: 411)
UUCUUCUAGGGGACCUGCCU,
(SEQ ID NO: 412)
GAGGACAAACGGGCAACAUA,
(SEQ ID NO: 413)
UUGUCAACAAGAAAAACCCC,
(SEQ ID NO: 414)
CCCAAGGUCUUACAUAAGAG,
(SEQ ID NO: 415)
CCGGGCAACGGGGUAAAGGU,
(SEQ ID NO: 416)
ACACAGAAAGGCCUUGUAAG,
(SEQ ID NO: 10834)
GAAAGCCCAAGAUGAUGGGA,
and
(SEQ ID NO: 417)
CACGCACGCGCUGAUGGCCC.

2. A method of editing a nucleobase of a hepatitis B virus (HBV) genome, the method comprising:
(i) contacting a cell comprising an HBV genome with one or more guide RNAs and a base editor comprising a polynucleotide programmable DNA binding domain and an adenosine deaminase or cytidine deaminase, wherein said guide RNA targets said base editor to effect an alteration of the nucleobase of the HBV genome, thereby editing a nucleobase in the HBV genome; and
(ii) contacting the cell with an antiretroviral drug, wherein contacting the cell with the antiretroviral drug is associated with an increase in base editing efficiency relative to a reference cell not contacted with the antiretroviral drug.

3. A method reducing HBsAg produced from integrated HBV DNA, the method comprising contacting a cell comprising an HBV genome with one or more guide RNAs and a base editor comprising a polynucleotide programmable DNA binding domain and an adenosine deaminase or cytidine deaminase, wherein said guide RNA targets said base editor to effect an alteration of the nucleobase of the HBV genome, thereby reducing HBsAg production from an integrated HBV DNA.

4. The method of claim 2, wherein the guide RNA is selected from one or more of
(SEQ ID NO: 405)
ACAAGAAUCCUCACAAUACC,
(SEQ ID NO: 406)
UCGCUGGAUGUGUCUGCGGC,
(SEQ ID NO: 407)
CACCUGUAUUCCCAUCCCAU,
(SEQ ID NO: 408)
GGGGCCAAGUCUGUACAGCA,
(SEQ ID NO: 409)
GCUGACGCAACCCCCACUGG,
(SEQ ID NO: 410)
GGAGCUACUGUGGAGUUACU,
(SEQ ID NO: 411)
UUCUUCUAGGGGACCUGCCU,
(SEQ ID NO: 412)
GAGGACAAACGGGCAACAUA,
(SEQ ID NO: 413)
UUGUCAACAAGAAAAACCCC,
(SEQ ID NO: 414)
CCCAAGGUCUUACAUAAGAG,
(SEQ ID NO: 415)
CCGGGCAACGGGGUAAAGGU,
(SEQ ID NO: 416)
ACACAGAAAGGCCUUGUAAG,
and
(SEQ ID NO: 417)
CACGCACGCGCUGAUGGCCC;
wherein the one or more guide RNAs comprise a spacer sequence selected from a sequence listed in Table 2A, Table 2B, Table 2C, and/or SEQ ID NOs: 3105-5485 and 8220-10830; or
wherein the one or more guide RNAs comprise the nucleotide sequences
(SEQ ID NO: 424)
mG*mA*mA*AGCCCAGGAUGAUGGGAGUUUUAGAGCUAGAAAUAGCAAG
UUAAAAUAAGGCUAGUCCGUUAUCAACUUGAAAAAGUGGCACCGAGUCG
GUGCUmU*mU*mU*
and
(SEQ ID NO: 422)
mC*mC*mA*UGCCCCAAAGCCACCCAGUUUUAGAGCUAGAAAUAGCAAG
UUAAAAUAAGGCUAGUCCGUUAUCAACUUGAAAAAGUGGCACCGAGUCG
GUGCUmU*mU*mU*.

5. The method of claim 2, wherein the one or more guide RNAs comprise the following nucleotide sequences gsasasAGCCCAGGAUGAUGGGAgUUUUAGagcuagaaauagcaaGUUaAaAuAaggcuaGU ccGUUAucAAcuugaaaaagugGcaccgagucggugcusususu (SEQ ID NO: 424) and cscsasUGCCCCAAAGCCACCCAgUUUUAGagcuagaaauagcaaGUUaAaAuAaggcuaGU CcGUUAucAAcuugaaaaagugGcaccgagucggugcusususu (SEQ ID NO: 422), where a, c, u, or g represent an A, C, U, or G nucleotide containing a 2′O-methyl (M) modification, respectively; and as, cs, us, or gs represent an A, C, U, or G nucleotide containing a 2′-O-methyl 3′-phosphorothioate (MS) modification, respectively.

6. A method of editing a nucleobase of a hepatitis B virus (HBV) genome, the method comprising contacting a cell comprising an HBV genome with an mRNA encoding a base editor comprising a polynucleotide programmable DNA binding domain and an adenosine deaminase or cytidine deaminase, and one or more guide RNAs comprising the sequences GAAAGCCCAGGAUGAUGGGA (SEQ ID NO: 657) and CCAUGCCCCAAAGCCACCCA (SEQ ID NO: 662), wherein said one or more guide RNAs target said base editor to effect an alteration of the nucleobase of the HBV genome, thereby editing a nucleobase in the HBV genome.

7. The method of claim 2, wherein alteration of the nucleobase in the polynucleotide encoding the HBV protein results in a missense mutation.

8. The method of claim 7, wherein the missense mutation is in an HBV pol gene and wherein the missense mutation results in an E24G, L25F, P26F, R27C, V48A, V48I, S382F, V378I, V378A, V379I, V379A, L377F, D380G, D380N, F381P, R376G, A422T, F423P, A432V, M433V, P434S, D540G, A688V, D689G, A717T, E718K, P713S, P713L, or L719P in an HBV polymerase protein encoded by the HBV pol gene:
wherein the missense mutation is in an HBV core gene, and wherein the missense mutation results in a T160A, T160A, P161F, S162L, C183R, or *184Q in an HBV core protein encoded by the HBV core gene;
wherein the missense mutation is in an HBV X gene, and wherein the missense mutation results in a H86R, W120R, E122K, E121K, or L141P in an HBV X protein encoded by the HBV X gene; and/or
wherein the missense mutation is in an HBV S gene, and wherein the missense mutation results in a S38F, L39F, W35R, W36R, T37I, T37A, R78Q, S34L, F80P, or D33G in an HBV S protein encoded by the HBV S gene.

9. A method of treating hepatitis B virus (HBV) infection in a subject comprising administering to a subject in need thereof a fusion protein, protein complex, or polynucleotide encoding said fusion protein or protein complex, said fusion protein or protein complex comprising a polynucleotide programmable DNA binding domain and a base editor domain that is an adenosine deaminase domain, and one or more guide RNAs that target the base editor domain to effect an A·T to G·C alteration of a nucleobase of the HBV genome, wherein said one or more guide RNAs comprise a nucleotide sequence, from 5′ to 3′, or a 1, 2, 3, 4, or 5 nucleotide 5′ and/or 3′ truncation fragment thereof, selected from one or more of
(SEQ ID NO: 405)
ACAAGAAUCCUCACAAUACC,
(SEQ ID NO: 406)
UCGCUGGAUGUGUCUGCGGC,
(SEQ ID NO: 407)
CACCUGUAUUCCCAUCCCAU,
(SEQ ID NO: 408)
GGGGCCAAGUCUGUACAGCA,
(SEQ ID NO: 409)
GCUGACGCAACCCCCACUGG,
(SEQ ID NO: 410)
GGAGCUACUGUGGAGUUACU,
(SEQ ID NO: 411)
UUCUUCUAGGGGACCUGCCU,
(SEQ ID NO: 412)
GAGGACAAACGGGCAACAUA,
(SEQ ID NO: 413)
UUGUCAACAAGAAAAACCCC,
(SEQ ID NO: 414)
CCCAAGGUCUUACAUAAGAG,
(SEQ ID NO: 415)
CCGGGCAACGGGGUAAAGGU,
(SEQ ID NO: 416)
ACACAGAAAGGCCUUGUAAG,
and
(SEQ ID NO: 417)
CACGCACGCGCUGAUGGCCC.

10. A method of treating a hepatitis B virus (HBV) infection in a subject, comprising administering to a subject in need thereof with one or more guide RNAs and a base editor comprising a polynucleotide programmable DNA binding domain and an adenosine deaminase or cytidine deaminase, wherein said one or more guide RNAs comprise the sequences GAAAGCCCAGGAUGAUGGGA (SEQ ID NO: 657) and CCAUGCCCCAAAGCCACCCA (SEQ ID NO: 662) that target said base editor to effect an alteration of the nucleobase of the HBV genome, thereby editing a nucleobase in the HBV genome.

11. A composition comprising a base editor(s) bound to a guide RNA(s), wherein said guide RNA(s) comprises a nucleotide sequence, from 5′ to 3′, or a 1, 2, 3, 4, or 5 nucleotide 5′ and/or 3′ truncation fragment thereof, selected from one or more of
(SEQ ID NO: 405)
ACAAGAAUCCUCACAAUACC,
(SEQ ID NO: 406)
UCGCUGGAUGUGUCUGCGGC,
(SEQ ID NO: 407)
CACCUGUAUUCCCAUCCCAU,
(SEQ ID NO: 408)
GGGGCCAAGUCUGUACAGCA,
(SEQ ID NO: 409)
GCUGACGCAACCCCCACUGG,
(SEQ ID NO: 410)
GGAGCUACUGUGGAGUUACU,
(SEQ ID NO: 411)
UUCUUCUAGGGGACCUGCCU,
(SEQ ID NO: 412)
GAGGACAAACGGGCAACAUA,
(SEQ ID NO: 413)
UUGUCAACAAGAAAAACCCC,
(SEQ ID NO: 414)
CCCAAGGUCUUACAUAAGAG,
(SEQ ID NO: 415)
CCGGGCAACGGGGUAAAGGU,
(SEQ ID NO: 416)
ACACAGAAAGGCCUUGUAAG,
and
(SEQ ID NO: 417)
CACGCACGCGCUGAUGGCCC.

12. The composition of claim 11, wherein the guide RNAs comprise the following scaffold sequence:
gUUUUAGagcuagaaauagcaaGUUaAaAuAaggcuaGUccGUUAucAAcuugaaaaagugG caccgagucggugcusususu (SEQ ID NO: 317), wherein a, c, u, or g represents bases with a 2′O-methyl (M) modification, and as, cs, us, or gs represents bases with a 2′-O-methyl 3′-phosphorothioate (MS) modification.

13. The composition of claim 11, wherein the base editor comprises an adenosine deaminase.

14. A pharmaceutical composition for the treatment of HBV infection comprising:
(i) a base editor, or a nucleic acid encoding the base editor, and one or more guide RNAs (gRNA) comprising a nucleic acid sequence complementary to an HBV gene in a pharmaceutically acceptable excipient, wherein said one or more guide RNAs comprise a nucleotide sequence, from 5′ to 3′, or a 1, 2, 3, 4, or 5 nucleotide 5′ and/or 3′ truncation fragment thereof, selected from one or more of ACAAGAAUCCUCACAAUACC (SEQ ID NO: 405), UCGCUGGAUGUGUCUGCGGC (SEQ ID NO:406), CACCUGUAUUCCCAUCCCAU (SEQ ID NO: 407), GGGGCCAAGUCUGUACAGCA (SEQ ID NO: 408), GCUGACGCAACCCCCACUGG (SEQ ID NO: 409), GGAGCUACUGUGGAGUUACU (SEQ ID NO: 410), UUCUUCUAGGGGACCUGCCU (SEQ ID NO: 411), GAGGACAAACGGGCAACAUA (SEQ ID NO: 412), UUGUCAACAAGAAAAACCCC (SEQ ID NO: 413), CCCAAGGUCUUACAUAAGAG (SEQ ID NO: 414), CCGGGCAACGGGGUAAAGGU (SEQ ID NO: 415), ACACAGAAAGGCCUUGUAAG (SEQ ID NO: 416), and CACGCACGCGCUGAUGGCCC (SEQ ID NO: 417).

15. The pharmaceutical composition of claim 14, wherein the base editor
(i) comprises a nuclease inactive bhCas12b; or
(ii) comprises an amino acid sequence that is at least 80%, 85%, 90%, 95%, 96%, 97%, 98%, 99%, or 100% identical to
(SEQ ID NO: 418)
MSEVEFSHEYWMRHALTLAKRARDEREVPVGAVLVLNNRVIGEGWNRAIGLHDPTAHAEIMA
LRQGGLVMQNYRLYDATLYVTFEPCVMCAGAMIHSRIGRVVFGVRNAKTGAAGSLMDVLHHP
GMNHRVEITEGILADECAALLCRFFRMPRRVENAQKKAQSSTDGSSGSETPGTSESATPESS
GAPKKKRKVGIHGVPAAATRSFILKIEPNEEVKKGLWKTHEVLNHGIAYYMNILKLIRQEAI
YEHHEQDPKNPKKVSKAEIQAELWDFVLKMQKCNSFTHEVDKDEVFNILRELYEELVPSSVE
KKGEANQLSNKFLYPLVDPNSQSGKGTASSGRKPRWYNLKIAGDPSWEEEKKKWEEDKKKDP
LAKILGKLAEYGLIPLFIPYTDSNEPIVKEIKWMEKSRNQSVRRLDKDMFIQALERFLSWES
WNLKVKEEYEKVEKEYKTLEERIKEDIQALKALEQYEKERQEQLLRDTLNTNEYRLSKRGLR
GWREIIQKWLKMDENEPSEKYLEVFKDYQRKHPREAGDYSVYEFLSKKENHFIWRNHPEYPY
LYATFCEIDKKKKDAKQQATFTLADPINHPLWVRFEERSGSNLNKYRILTEQLHTEKLKKKL
TVQLDRLIYPTESGGWEEKGKVDIVLLPSRQFYNQIFLDIEEKGKHAFTYKDESIKFPLKGT
LGGARVQFDRDHLRRYPHKVESGNVGRIYFNMTVNIEPTESPVSKSLKIHRDDFPKVVNFKP
KELTEWIKDSKGKKLKSGIESLEIGLRVMSIALGQRQAAAASIFEVVDQKPDIEGKLFFPIK
GTELYAVHRASFNIKLPGETLVKSREVLRKAREDNLKLMNQKLNFLRNVLHFQQFEDITERE
KRVTKWISRQENSDVPLVYQDELIQIRELMYKPYKDWVAFLKQLHKRLEVEIGKEVKHWRKS
LSDGRKGLYGISLKNIDEIDRTRKELLRWSLRPTEPGEVRRLEPGQRFAIDQLNHLNALKED
RLKKMANTIIMHALGYCYDVRKKKWQAKNPACQIILFEDLSNYNPYKERSRFENSRLMKWSR
REIPRQVALQGEIYGLQVGEVGAQFSSRFHAKTGSPGIRCRVVTKEKLQDNRFFKNLQREGR
LTLDKIAVLKEGDLYPDKGGEKFISLSKDRKCVTTHADINAAQNLQKRFWIRTHGFYKVYCK
AYQVDGQTVYIPESKDQKQKIIEEFGEGYFILKDGVYEWVNAGKLKIKKGSSKQSSSELVDS
DILKDSFDLASELKGEKLMLYRDPSGNVFPSDKWMAAGVFFGKLERILISKLTNQYSISTIE
DDSSKQSMKRPAATKKAGQAKKKK.

16. The pharmaceutical composition of claim 14, wherein the base editor comprises a bhCas12b, or a bhCas12b variant comprising amino acid substitutions D952A, S893R, K846R, and E837G.

17. The composition of claim 14, wherein the guide RNAs comprise the following scaffold sequence:
gUUUUAGagcuagaaauagcaaGUUaAaAuAaggcuaGUccGUUAucAAcuugaaaaagugG caccgagucggugcusususu (SEQ ID NO: 317), wherein a, c, u, or g represents bases with a 2′O-methyl (M) modification, and as, cs, us, or gs represents bases with a 2′-O-methyl 3′-phosphorothioate (MS) modification.

18. The composition of claim 14, wherein the guide RNAs comprise the following scaffold sequence:
GUUUUAGAGCUAGAAAUAGCAAGUUAAAAUAAGGCUAGUCCGUUAUCAACUUGAAAAAGUGG CACCGAGUCGGUGCUmU*mU*mU* (SEQ ID NO: 422), where mA*, mC*, mG*, and mU* represent bases with a 2′-O-methyl 3′-phosphorothioate modification.

19. A method of treating HBV infection, the method comprising administering to a subject in need thereof the composition of claim 14.

20. A guide RNA comprise a nucleotide sequence, from 5′ to 3′, or a 1, 2, 3, 4, or 5 nucleotide 5′ and/or 3′ truncation fragment thereof, selected from one or more of
(SEQ ID NO: 405)
ACAAGAAUCCUCACAAUACC,
(SEQ ID NO: 406)
UCGCUGGAUGUGUCUGCGGC,
(SEQ ID NO: 407)
CACCUGUAUUCCCAUCCCAU,
(SEQ ID NO: 408)
GGGGCCAAGUCUGUACAGCA,
(SEQ ID NO: 409)
GCUGACGCAACCCCCACUGG,
(SEQ ID NO: 410)
GGAGCUACUGUGGAGUUACU,
(SEQ ID NO: 411)
UUCUUCUAGGGGACCUGCCU,
(SEQ ID NO: 412)
GAGGACAAACGGGCAACAUA,
(SEQ ID NO: 413)
UUGUCAACAAGAAAAACCCC,
(SEQ ID NO: 414)
CCCAAGGUCUUACAUAAGAG,
(SEQ ID NO: 415)
CCGGGCAACGGGGUAAAGGU,
(SEQ ID NO: 416)
ACACAGAAAGGCCUUGUAAG,
and
(SEQ ID NO: 417)
CACGCACGCGCUGAUGGCCC.

21. The guide RNA of claim 20, wherein the guide RNA comprises the following scaffold sequence:
gUUUUAGagcuagaaauagcaaGUUaAaAuAaggcuaGUccGUUAucAAcuugaaaaagugG caccgagucggugcusususu (SEQ ID NO: 317), wherein a, c, u, or g represents bases with a 2′O-methyl (M) modification, and as, cs, us, or gs represents bases with a 2′-O-methyl 3′-phosphorothioate (MS) modification.

22. The guide RNA of claim 21, wherein the guide RNA comprises the following scaffold sequence:
GUUUUAGAGCUAGAAAUAGCAAGUUAAAAUAAGGCUAGUCCGUUAUCAACUUGAAAAAGUGG CACCGAGUCGGUGCUmU*mU*mU* (SEQ ID NO: 422), where mA*, mC*, mG*, and mU* represent bases with a 2′-O-methyl 3′-phosphorothioate modification.

23. A pharmaceutical composition comprising (i) a nucleic acid encoding a base editor, and (ii) the guide RNA of claim 20.

The application's sequence listing, which the Patent Office published only in electronic form, follows.

SEQUENCE LISTING (10834 sequences)

SEQ ID NO: 1 - protein, 167 aa, Escherichia coli
  REGION 1..167: note = misc_feature - TadA*7.10 (ecTadA) polypeptide sequence
MSEVEFSHEYWMRHALTLAKRARDEREVPVGAVLVLNNRVIGEGWNRAIGLHDPTAHAEIMALRQGGLVMQNYRLIDATLYVTFEPCVMCAGAMIHSRIGRVVFGVRNAKTGAAGSLMDVLHYPGMNHRVEITEGILADECAALLCYFFRMPRQVFNAQKKAQSSTD

SEQ ID NO: 2 - DNA, 4092 bp, synthetic construct
  misc_feature 1..4092: note = BhCas12b GGSGGS-ABE8-Xten20at P153 polynucleotide sequence
  misc_feature 1..6: note = Kozak sequence
  misc_feature 7..57: note = Sequence encoding N-terminal nuclear localization signal
  misc_feature 58..513: note = Sequence encoding BhCas12b
  misc_feature 514..531: note = Sequence encoding a linker
  misc_feature 532..1029: note = Sequence encoding TadA*8
  misc_feature 1030..1089: note = Sequence encoding Xten20 linker
  misc_feature 1090..3954: note = Sequence encoding BhCas12b
  misc_feature 3955..4002: note = Sequence encoding C-terminal NLS
  misc_feature 4003..4008: note = Sequence encoding GS linker
  misc_feature 4009..4089: note = Sequence encoding 3x hemagglutinin (HA) tag
  source 1..4092: mol_type = other DNA
gccaccatggccccaaagaagaagcggaaggtcggtatccacggagtcccagcagccgccaccagatccttcatcctgaagatcgagcccaacgaggaagtgaagaaaggcctctggaaaacccacgaggtgctgaaccacggaatcgcctactacatgaatatcctgaagctgatccggcaagaggccatctacgagcaccacgagcaggaccccaagaatcccaagaaggtgtccaaggccgagatccaggccgagctgtgggatttcgtgctgaagatgcagaagtgcaacagcttcacacacgaggtggacaaggacgaggtgttcaacatcctgagagagctgtacgaggaactggtgcccagcagcgtggaaaagaagggcgaagccaaccagctgagcaacaagtttctgtaccctctggtggaccccaacagccagtctggaaagggaacagccagcagcggcagaaagcccagatggtacaacctgaagattgccggcgatcccggaggctctggaggaagctccgaagtcgagttttcccatgagtactggatgagacacgcattgactctcgcaaagagggctcgagatgaacgcgaggtgcccgtgggggcagtactcgtgctcaacaatcgcgtaatcggcgaaggttggaatagggcaatcggactccacgaccccactgcacatgcggaaatcatggcccttcgacagggagggcttgtgatgcagaattatcgactttatgatgcgacgctgtacgtcacgtttgaaccttgcgtaatgtgcgcgggagctatgattcactcccgcattggacgagttgtattcggtgttcgcaacgccaagacgggtgccgcaggttcactgatggacgtgctgcatcatccaggcatgaaccaccgggtagaaatcacagaaggcatattggcggacgaatgtgcggcgctgttgtgtcgtttttttcgcatgcccaggcgggtctttaacgcccagaaaaaagcacaatcctctactgacggctcttctggatctgaaacacctggcacaagcgagagcgccacccctgagagctctggctcctgggaagaagagaagaagaagtgggaagaagataagaaaaaggacccgctggccaagatcctgggcaagctggctgagtacggactgatccctctgttcatcccctacaccgacagcaacgagcccatcgtgaaagaaatcaagtggatggaaaagtcccggaaccagagcgtgcggcggctggataaggacatgttcattcaggccctggaacggttcctgagctgggagagctggaacctgaaagtgaaagaggaatacgagaaggtcgagaaagagtacaagaccctggaagagaggatcaaagaggacatccaggctctgaaggctctggaacagtatgagaaagagcggcaagaacagctgctgcgggacaccctgaacaccaacgagtaccggctgagcaagagaggccttagaggctggcgggaaatcatccagaaatggctgaaaatggacgagaacgagccctccgagaagtacctggaagtgttcaaggactaccagcggaagcaccctagagaggccggcgattacagcgtgtacgagttcctgtccaagaaagagaaccacttcatctggcggaatcaccctgagtacccctacctgtacgccaccttctgcgagatcgacaagaaaaagaaggacgccaagcagcaggccaccttcacactggccgatcctatcaatcaccctctgtgggtccgattcgaggaaagaagcggcagcaacctgaacaagtacagaatcctgaccgagcagctgcacaccgagaagctgaagaaaaagctgacagtgcagctggaccggctgatctaccctacagaatctggcggctgggaagagaagggcaaagtggacattgtgctgctgcccagccggcagttctacaaccagatcttcctggacatcgaggaaaagggcaagcacgccttcacctacaaggatgagagcatcaagttccctctgaagggcacactcggcggagccagagtgcagttcgacagagatcacctgagaagataccctcacaaggtggaaagcggcaacgtgggcagaatctacttcaacatgaccgtgaacatcgagcctacagagtccccagtgtccaagtctctgaagatccaccgggacgacttccccaaggtggtcaacttcaagcccaaagaactgaccgagtggatcaaggacagcaagggcaagaaactgaagtccggcatcgagtccctggaaatcggcctgagagtgatgagcatcgacctgggacagagacaggccgctgccgcctctattttcgaggtggtggatcagaagcccgacatcgaaggcaagctgtttttcccaatcaagggcaccgagctgtatgccgtgcacagagccagcttcaacatcaagctgcccggcgagacactggtcaagagcagagaagtgctgcggaaggccagagaggacaatctgaaactgatgaaccagaagctcaacttcctgcggaacgtgctgcacttccagcagttcgaggacatcaccgagagagagaagcgggtcaccaagtggatcagcagacaagagaacagcgacgtgcccctggtgtaccaggatgagctgatccagatccgcgagctgatgtacaagccttacaaggactgggtcgccttcctgaagcagctccacaagagactggaagtcgagatcggcaaagaagtgaagcactggcggaagtccctgagcgacggaagaaagggcctgtacggcatctccctgaagaacatcgacgagatcgatcggacccggaagttcctgctgagatggtccctgaggcctaccgaacctggcgaagtgcgtagactggaacccggccagagattcgccatcgaccagctgaatcacctgaacgccctgaaagaagatcggctgaagaagatggccaacaccatcatcatgcacgccctgggctactgctacgacgtgcggaagaagaaatggcaggctaagaaccccgcctgccagatcatcctgttcgaggatctgagcaactacaacccctacgaggaaaggtcccgcttcgagaacagcaagctcatgaagtggtccagacgcgagatccccagacaggttgcactgcagggcgagatctatggcctgcaagtgggagaagtgggcgctcagttcagcagcagattccacgccaagacaggcagccctggcatcagatgtagcgtcgtgaccaaagagaagctgcaggacaatcggttcttcaagaatctgcagagagagggcagactgaccctggacaaaatcgccgtgctgaaagagggcgatctgtacccagacaaaggcggcgagaagttcatcagcctgagcaaggatcggaagtgcgtgaccacacacgccgacatcaacgccgctcagaacctgcagaagcggttctggacaagaacccacggcttctacaaggtgtactgcaaggcctaccaggtggacggccagaccgtgtacatccctgagagcaaggaccagaagcagaagatcatcgaagagttcggcgagggctacttcattctgaaggacggggtgtacgaatgggtcaacgccggcaagctgaaaatcaagaagggcagctccaagcagagcagcagcgagctggtggatagcgacatcctgaaagacagcttcgacctggcctccgagctgaaaggcgaaaagctgatgctgtacagggaccccagcggcaatgtgttccccagcgacaaatggatggccgctggcgtgttcttcggaaagctggaacgcatcctgatcagcaagctgaccaaccagtactccatcagcaccatcgaggacgacagcagcaagcagtctatgaaaaggccggcggccacgaaaaaggccggccaggcaaaaaagaaaaagggatcctacccatacgatgttccagattacgcttatccctacgacgtgcctgattatgcatacccatatgatgtccccgactatgcctaa

SEQ ID NO: 3 - protein, 1361 aa, synthetic construct
  REGION 1..1361: note = BhCas12b GGSGGS-ABE8-Xten20at P153 polypeptide sequence
MAPKKKRKVGIHGVPAAATRSFILKIEPNEEVKKGLWKTHEVLNHGIAYYMNILKLIRQEAIYEHHEQDPKNPKKVSKAEIQAELWDFVLKMQKCNSFTHEVDKDEVFNILRELYEELVPSSVEKKGEANQLSNKFLYPLVDPNSQSGKGTASSGRKPRWYNLKIAGDPGGSGGSSEVEFSHEYWMRHALTLAKRARDEREVPVGAVLVLNNRVIGEGWNRAIGLHDPTAHAEIMALRQGGLVMQNYRLYDATLYVTFEPCVMCAGAMIHSRIGRVVFGVRNAKTGAAGSLMDVLHHPGMNHRVEITEGILADECAALLCRFFRMPRRVFNAQKKAQSSTDGSSGSETPGTSESATPESSGSWEEEKKKWEEDKKKDPLAKILGKLAEYGLIPLFIPYTDSNEPIVKEIKWMEKSRNQSVRRLDKDMFIQALERFLSWESWNLKVKEEYEKVEKEYKTLEERIKEDIQALKALEQYEKERQEQLLRDTLNTNEYRLSKRGLRGWREIIQKWLKMDENEPSEKYLEVFKDYQRKHPREAGDYSVYEFLSKKENHFIWRNHPEYPYLYATFCEIDKKKKDAKQQATFTLADPINHPLWVRFEERSGSNLNKYRILTEQLHTEKLKKKLTVQLDRLIYPTESGGWEEKGKVDIVLLPSRQFYNQIFLDIEEKGKHAFTYKDESIKFPLKGTLGGARVQFDRDHLRRYPHKVESGNVGRIYFNMTVNIEPTESPVSKSLKIHRDDFPKVVNFKPKELTEWIKDSKGKKLKSGIESLEIGLRVMSIDLGQRQAAAASIFEVVDQKPDIEGKLFFPIKGTELYAVHRASFNIKLPGETLVKSREVLRKAREDNLKLMNQKLNFLRNVLHFQQFEDITEREKRVTKWISRQENSDVPLVYQDELIQIRELMYKPYKDWVAFLKQLHKRLEVEIGKEVKHWRKSLSDGRKGLYGISLKNIDEIDRTRKFLLRWSLRPTEPGEVRRLEPGQRFAIDQLNHLNALKEDRLKKMANTIIMHALGYCYDVRKKKWQAKNPACQIILFEDLSNYNPYEERSRFENSKLMKWSRREIPRQVALQGEIYGLQVGEVGAQFSSRFHAKTGSPGIRCSVVTKEKLQDNRFFKNLQREGRLTLDKIAVLKEGDLYPDKGGEKFISLSKDRKCVTTHADINAAQNLQKRFWTRTHGFYKVYCKAYQVDGQTVYIPESKDQKQKIIEEFGEGYFILKDGVYEWVNAGKLKIKKGSSKQSSSELVDSDILKDSFDLASELKGEKLMLYRDPSGNVFPSDKWMAAGVFFGKLERILISKLTNQYSISTIEDDSSKQSMKRPAATKKAGQAKKKKGSYPYDVPDYAYPYDVPDYAYPYDVPDYA

SEQ ID NO: 4 - DNA, 4092 bp, synthetic construct
  misc_feature 1..4092: note = BhCas12b GGSGGS-ABE8-Xten20at K255 polynucleotide sequence
  misc_feature 1..6: note = Kozak sequence
  misc_feature 7..57: note = Sequence encoding N-terminal nuclear localization signal (NLS)
  misc_feature 58..822: note = Sequence encoding BhCas12b
  misc_feature 823..840: note = Sequence encoding a linker
  misc_feature 841..1338: note = Sequence encoding TadA*8
  misc_feature 1339..1398: note = Sequence encoding Xten20 linker
  misc_feature 1399..3954: note = Sequence encoding BhCas12b
  misc_feature 3955..4002: note = Sequence encoding C-terminal NLS
  misc_feature 4003..4008: note = Sequence encoding a GS linker
  misc_feature 4009..4089: note = Sequence encoding 3x hemagglutinin (HA) tag
  source 1..4092: mol_type = other DNA
gccaccatggccccaaagaagaagcggaaggtcggtatccacggagtcccagcagccgccaccagatccttcatcctgaagatcgagcccaacgaggaagtgaagaaaggcctctggaaaacccacgaggtgctgaaccacggaatcgcctactacatgaatatcctgaagctgatccggcaagaggccatctacgagcaccacgagcaggaccccaagaatcccaagaaggtgtccaaggccgagatccaggccgagctgtgggatttcgtgctgaagatgcagaagtgcaacagcttcacacacgaggtggacaaggacgaggtgttcaacatcctgagagagctgtacgaggaactggtgcccagcagcgtggaaaagaagggcgaagccaaccagctgagcaacaagtttctgtaccctctggtggaccccaacagccagtctggaaagggaacagccagcagcggcagaaagcccagatggtacaacctgaagattgccggcgatccctcctgggaagaagagaagaagaagtgggaagaagataagaaaaaggacccgctggccaagatcctgggcaagctggctgagtacggactgatccctctgttcatcccctacaccgacagcaacgagcccatcgtgaaagaaatcaagtggatggaaaagtcccggaaccagagcgtgcggcggctggataaggacatgttcattcaggccctggaacggttcctgagctgggagagctggaacctgaaagtgaaagaggaatacgagaaggtcgagaaagagtacaagaccctggaagagaggatcaaaggaggctctggaggaagctccgaagtcgagttttcccatgagtactggatgagacacgcattgactctcgcaaagagggctcgagatgaacgcgaggtgcccgtgggggcagtactcgtgctcaacaatcgcgtaatcggcgaaggttggaatagggcaatcggactccacgaccccactgcacatgcggaaatcatggcccttcgacagggagggcttgtgatgcagaattatcgactttatgatgcgacgctgtacgtcacgtttgaaccttgcgtaatgtgcgcgggagctatgattcactcccgcattggacgagttgtattcggtgttcgcaacgccaagacgggtgccgcaggttcactgatggacgtgctgcatcatccaggcatgaaccaccgggtagaaatcacagaaggcatattggcggacgaatgtgcggcgctgttgtgtcgtttttttcgcatgcccaggcgggtctttaacgcccagaaaaaagcacaatcctctactgacggctcttctggatctgaaacacctggcacaagcgagagcgccacccctgagagctctggcgaggacatccaggctctgaaggctctggaacagtatgagaaagagcggcaagaacagctgctgcgggacaccctgaacaccaacgagtaccggctgagcaagagaggccttagaggctggcgggaaatcatccagaaatggctgaaaatggacgagaacgagccctccgagaagtacctggaagtgttcaaggactaccagcggaagcaccctagagaggccggcgattacagcgtgtacgagttcctgtccaagaaagagaaccacttcatctggcggaatcaccctgagtacccctacctgtacgccaccttctgcgagatcgacaagaaaaagaaggacgccaagcagcaggccaccttcacactggccgatcctatcaatcaccctctgtgggtccgattcgaggaaagaagcggcagcaacctgaacaagtacagaatcctgaccgagcagctgcacaccgagaagctgaagaaaaagctgacagtgcagctggaccggctgatctaccctacagaatctggcggctgggaagagaagggcaaagtggacattgtgctgctgcccagccggcagttctacaaccagatcttcctggacatcgaggaaaagggcaagcacgccttcacctacaaggatgagagcatcaagttccctctgaagggcacactcggcggagccagagtgcagttcgacagagatcacctgagaagataccctcacaaggtggaaagcggcaacgtgggcagaatctacttcaacatgaccgtgaacatcgagcctacagagtccccagtgtccaagtctctgaagatccaccgggacgacttccccaaggtggtcaacttcaagcccaaagaactgaccgagtggatcaaggacagcaagggcaagaaactgaagtccggcatcgagtccctggaaatcggcctgagagtgatgagcatcgacctgggacagagacaggccgctgccgcctctattttcgaggtggtggatcagaagcccgacatcgaaggcaagctgtttttcccaatcaagggcaccgagctgtatgccgtgcacagagccagcttcaacatcaagctgcccggcgagacactggtcaagagcagagaagtgctgcggaaggccagagaggacaatctgaaactgatgaaccagaagctcaacttcctgcggaacgtgctgcacttccagcagttcgaggacatcaccgagagagagaagcgggtcaccaagtggatcagcagacaagagaacagcgacgtgcccctggtgtaccaggatgagctgatccagatccgcgagctgatgtacaagccttacaaggactgggtcgccttcctgaagcagctccacaagagactggaagtcgagatcggcaaagaagtgaagcactggcggaagtccctgagcgacggaagaaagggcctgtacggcatctccctgaagaacatcgacgagatcgatcggacccggaagttcctgctgagatggtccctgaggcctaccgaacctggcgaagtgcgtagactggaacccggccagagattcgccatcgaccagctgaatcacctgaacgccctgaaagaagatcggctgaagaagatggccaacaccatcatcatgcacgccctgggctactgctacgacgtgcggaagaagaaatggcaggctaagaaccccgcctgccagatcatcctgttcgaggatctgagcaactacaacccctacgaggaaaggtcccgcttcgagaacagcaagctcatgaagtggtccagacgcgagatccccagacaggttgcactgcagggcgagatctatggcctgcaagtgggagaagtgggcgctcagttcagcagcagattccacgccaagacaggcagccctggcatcagatgtagcgtcgtgaccaaagagaagctgcaggacaatcggttcttcaagaatctgcagagagagggcagactgaccctggacaaaatcgccgtgctgaaagagggcgatctgtacccagacaaaggcggcgagaagttcatcagcctgagcaaggatcggaagtgcgtgaccacacacgccgacatcaacgccgctcagaacctgcagaagcggttctggacaagaacccacggcttctacaaggtgtactgcaaggcctaccaggtggacggccagaccgtgtacatccctgagagcaaggaccagaagcagaagatcatcgaagagttcggcgagggctacttcattctgaaggacggggtgtacgaatgggtcaacgccggcaagctgaaaatcaagaagggcagctccaagcagagcagcagcgagctggtggatagcgacatcctgaaagacagcttcgacctggcctccgagctgaaaggcgaaaagctgatgctgtacagggaccccagcggcaatgtgttccccagcgacaaatggatggccgctggcgtgttcttcggaaagctggaacgcatcctgatcagcaagctgaccaaccagtactccatcagcaccatcgaggacgacagcagcaagcagtctatgaaaaggccggcggccacgaaaaaggccggccaggcaaaaaagaaaaagggatcctacccatacgatgttccagattacgcttatccctacgacgtgcctgattatgcatacccatatgatgtccccgactatgcctaa

SEQ ID NO: 5 - protein, 1361 aa, synthetic construct
  REGION 1..1361: note = BhCas12b GGSGGS-ABE8-Xten20at K255 polypeptide sequence
MAPKKKRKVGIHGVPAAATRSFILKIEPNEEVKKGLWKTHEVLNHGIAYYMNILKLIRQEAIYEHHEQDPKNPKKVSKAEIQAELWDFVLKMQKCNSFTHEVDKDEVFNILRELYEELVPSSVEKKGEANQLSNKFLYPLVDPNSQSGKGTASSGRKPRWYNLKIAGDPSWEEEKKKWEEDKKKDPLAKILGKLAEYGLIPLFIPYTDSNEPIVKEIKWMEKSRNQSVRRLDKDMFIQALERFLSWESWNLKVKEEYEKVEKEYKTLEERIKGGSGGSSEVEFSHEYWMRHALTLAKRARDEREVPVGAVLVLNNRVIGEGWNRAIGLHDPTAHAEIMALRQGGLVMQNYRLYDATLYVTFEPCVMCAGAMIHSRIGRVVFGVRNAKTGAAGSLMDVLHHPGMNHRVEITEGILADECAALLCRFFRMPRRVFNAQKKAQSSTDGSSGSETPGTSESATPESSGEDIQALKALEQYEKERQEQLLRDTLNTNEYRLSKRGLRGWREIIQKWLKMDENEPSEKYLEVFKDYQRKHPREAGDYSVYEFLSKKENHFIWRNHPEYPYLYATFCEIDKKKKDAKQQATFTLADPINHPLWVRFEERSGSNLNKYRILTEQLHTEKLKKKLTVQLDRLIYPTESGGWEEKGKVDIVLLPSRQFYNQIFLDIEEKGKHAFTYKDESIKFPLKGTLGGARVQFDRDHLRRYPHKVESGNVGRIYFNMTVNIEPTESPVSKSLKIHRDDFPKVVNFKPKELTEWIKDSKGKKLKSGIESLEIGLRVMSIDLGQRQAAAASIFEVVDQKPDIEGKLFFPIKGTELYAVHRASFNIKLPGETLVKSREVLRKAREDNLKLMNQKLNFLRNVLHFQQFEDITEREKRVTKWISRQENSDVPLVYQDELIQIRELMYKPYKDWVAFLKQLHKRLEVEIGKEVKHWRKSLSDGRKGLYGISLKNIDEIDRTRKFLLRWSLRPTEPGEVRRLEPGQRFAIDQLNHLNALKEDRLKKMANTIIMHALGYCYDVRKKKWQAKNPACQIILFEDLSNYNPYEERSRFENSKLMKWSRREIPRQVALQGEIYGLQVGEVGAQFSSRFHAKTGSPGIRCSVVTKEKLQDNRFFKNLQREGRLTLDKIAVLKEGDLYPDKGGEKFISLSKDRKCVTTHADINAAQNLQKRFWTRTHGFYKVYCKAYQVDGQTVYIPESKDQKQKIIEEFGEGYFILKDGVYEWVNAGKLKIKKGSSKQSSSELVDSDILKDSFDLASELKGEKLMLYRDPSGNVFPSDKWMAAGVFFGKLERILISKLTNQYSISTIEDDSSKQSMKRPAATKKAGQAKKKKGSYPYDVPDYAYPYDVPDYAYPYDVPDYA

SEQ ID NO: 6 - DNA, 4092 bp, synthetic construct
  misc_feature 1..4092: note = BhCas12b GGSGGS-ABE8-Xten20at D306 polynucleotide sequence
  misc_feature 1..6: note = Kozak sequence
  misc_feature 7..57: note = Sequence encoding N-terminal nuclear localization signal (NLS)
  misc_feature 58..975: note = Sequence encoding BhCas12b
  misc_feature 976..993: note = Sequence encoding a linker
  misc_feature 994..1491: note = Sequence encoding TadA*8
  misc_feature 1492..1551: note = Sequence encoding Xten20 linker
  misc_feature 1552..3954: note = Sequence encoding BhCas12b
  misc_feature 3955..4002: note = Sequence encoding C-terminal NLS
  misc_feature 4003..4008: note = Sequence encoding a GS linker
  misc_feature 4009..4089: note = Sequence encoding 3x hemagglutinin (HA) tag
  source 1..4092: mol_type = other DNA
gccaccatggccccaaagaagaagcggaaggtcggtatccacggagtcccagcagccgccaccagatccttcatcctgaagatcgagcccaacgaggaagtgaagaaaggcctctggaaaacccacgaggtgctgaaccacggaatcgcctactacatgaatatcctgaagctgatccggcaagaggccatctacgagcaccacgagcaggaccccaagaatcccaagaaggtgtccaaggccgagatccaggccgagctgtgggatttcgtgctgaagatgcagaagtgcaacagcttcacacacgaggtggacaaggacgaggtgttcaacatcctgagagagctgtacgaggaactggtgcccagcagcgtggaaaagaagggcgaagccaaccagctgagcaacaagtttctgtaccctctggtggaccccaacagccagtctggaaagggaacagccagcagcggcagaaagcccagatggtacaacctgaagattgccggcgatccctcctgggaagaagagaagaagaagtgggaagaagataagaaaaaggacccgctggccaagatcctgggcaagctggctgagtacggactgatccctctgttcatcccctacaccgacagcaacgagcccatcgtgaaagaaatcaagtggatggaaaagtcccggaaccagagcgtgcggcggctggataaggacatgttcattcaggccctggaacggttcctgagctgggagagctggaacctgaaagtgaaagaggaatacgagaaggtcgagaaagagtacaagaccctggaagagaggatcaaagaggacatccaggctctgaaggctctggaacagtatgagaaagagcggcaagaacagctgctgcgggacaccctgaacaccaacgagtaccggctgagcaagagaggccttagaggctggcgggaaatcatccagaaatggctgaaaatggacggaggctctggaggaagctccgaagtcgagttttcccatgagtactggatgagacacgcattgactctcgcaaagagggctcgagatgaacgcgaggtgcccgtgggggcagtactcgtgctcaacaatcgcgtaatcggcgaaggttggaatagggcaatcggactccacgaccccactgcacatgcggaaatcatggcccttcgacagggagggcttgtgatgcagaattatcgactttatgatgcgacgctgtacgtcacgtttgaaccttgcgtaatgtgcgcgggagctatgattcactcccgcattggacgagttgtattcggtgttcgcaacgccaagacgggtgccgcaggttcactgatggacgtgctgcatcatccaggcatgaaccaccgggtagaaatcacagaaggcatattggcggacgaatgtgcggcgctgttgtgtcgtttttttcgcatgcccaggcgggtctttaacgcccagaaaaaagcacaatcctctactgacggctcttctggatctgaaacacctggcacaagcgagagcgccacccctgagagctctggcgagaacgagccctccgagaagtacctggaagtgttcaaggactaccagcggaagcaccctagagaggccggcgattacagcgtgtacgagttcctgtccaagaaagagaaccacttcatctggcggaatcaccctgagtacccctacctgtacgccaccttctgcgagatcgacaagaaaaagaaggacgccaagcagcaggccaccttcacactggccgatcctatcaatcaccctctgtgggtccgattcgaggaaagaagcggcagcaacctgaacaagtacagaatcctgaccgagcagctgcacaccgagaagctgaagaaaaagctgacagtgcagctggaccggctgatctaccctacagaatctggcggctgggaagagaagggcaaagtggacattgtgctgctgcccagccggcagttctacaaccagatcttcctggacatcgaggaaaagggcaagcacgccttcacctacaaggatgagagcatcaagttccctctgaagggcacactcggcggagccagagtgcagttcgacagagatcacctgagaagataccctcacaaggtggaaagcggcaacgtgggcagaatctacttcaacatgaccgtgaacatcgagcctacagagtccccagtgtccaagtctctgaagatccaccgggacgacttccccaaggtggtcaacttcaagcccaaagaactgaccgagtggatcaaggacagcaagggcaagaaactgaagtccggcatcgagtccctggaaatcggcctgagagtgatgagcatcgacctgggacagagacaggccgctgccgcctctattttcgaggtggtggatcagaagcccgacatcgaaggcaagctgtttttcccaatcaagggcaccgagctgtatgccgtgcacagagccagcttcaacatcaagctgcccggcgagacactggtcaagagcagagaagtgctgcggaaggccagagaggacaatctgaaactgatgaaccagaagctcaacttcctgcggaacgtgctgcacttccagcagttcgaggacatcaccgagagagagaagcgggtcaccaagtggatcagcagacaagagaacagcgacgtgcccctggtgtaccaggatgagctgatccagatccgcgagctgatgtacaagccttacaaggactgggtcgccttcctgaagcagctccacaagagactggaagtcgagatcggcaaagaagtgaagcactggcggaagtccctgagcgacggaagaaagggcctgtacggcatctccctgaagaacatcgacgagatcgatcggacccggaagttcctgctgagatggtccctgaggcctaccgaacctggcgaagtgcgtagactggaacccggccagagattcgccatcgaccagctgaatcacctgaacgccctgaaagaagatcggctgaagaagatggccaacaccatcatcatgcacgccctgggctactgctacgacgtgcggaagaagaaatggcaggctaagaaccccgcctgccagatcatcctgttcgaggatctgagcaactacaacccctacgaggaaaggtcccgcttcgagaacagcaagctcatgaagtggtccagacgcgagatccccagacaggttgcactgcagggcgagatctatggcctgcaagtgggagaagtgggcgctcagttcagcagcagattccacgccaagacaggcagccctggcatcagatgtagcgtcgtgaccaaagagaagctgcaggacaatcggttcttcaagaatctgcagagagagggcagactgaccctggacaaaatcgccgtgctgaaagagggcgatctgtacccagacaaaggcggcgagaagttcatcagcctgagcaaggatcggaagtgcgtgaccacacacgccgacatcaacgccgctcagaacctgcagaagcggttctggacaagaacccacggcttctacaaggtgtactgcaaggcctaccaggtggacggccagaccgtgtacatccctgagagcaaggaccagaagcagaagatcatcgaagagttcggcgagggctacttcattctgaaggacggggtgtacgaatgggtcaacgccggcaagctgaaaatcaagaagggcagctccaagcagagcagcagcgagctggtggatagcgacatcctgaaagacagcttcgacctggcctccgagctgaaaggcgaaaagctgatgctgtacagggaccccagcggcaatgtgttccccagcgacaaatggatggccgctggcgtgttcttcggaaagctggaacgcatcctgatcagcaagctgaccaaccagtactccatcagcaccatcgaggacgacagcagcaagcagtctatgaaaaggccggcggccacgaaaaaggccggccaggcaaaaaagaaaaagggatcctacccatacgatgttccagattacgcttatccctacgacgtgcctgattatgcatacccatatgatgtccccgactatgcctaa

SEQ ID NO: 7 - protein, 1361 aa, synthetic construct
  REGION 1..1361: note = BhCas12b GGSGGS-ABE8-Xten20at D306 polypeptide sequence
MAPKKKRKVGIHGVPAAATRSFILKIEPNEEVKKGLWKTHEVLNHGIAYYMNILKLIRQEAIYEHHEQDPKNPKKVSKAEIQAELWDFVLKMQKCNSFTHEVDKDEVFNILRELYEELVPSSVEKKGEANQLSNKFLYPLVDPNSQSGKGTASSGRKPRWYNLKIAGDPSWEEEKKKWEEDKKKDPLAKILGKLAEYGLIPLFIPYTDSNEPIVKEIKWMEKSRNQSVRRLDKDMFIQALERFLSWESWNLKVKEEYEKVEKEYKTLEERIKEDIQALKALEQYEKERQEQLLRDTLNTNEYRLSKRGLRGWREIIQKWLKMDGGSGGSSEVEFSHEYWMRHALTLAKRARDEREVPVGAVLVLNNRVIGEGWNRAIGLHDPTAHAEIMALRQGGLVMQNYRLYDATLYVTFEPCVMCAGAMIHSRIGRVVFGVRNAKTGAAGSLMDVLHHPGMNHRVEITEGILADECAALLCRFFRMPRRVFNAQKKAQSSTDGSSGSETPGTSESATPESSGENEPSEKYLEVFKDYQRKHPREAGDYSVYEFLSKKENHFIWRNHPEYPYLYATFCEIDKKKKDAKQQATFTLADPINHPLWVRFEERSGSNLNKYRILTEQLHTEKLKKKLTVQLDRLIYPTESGGWEEKGKVDIVLLPSRQFYNQIFLDIEEKGKHAFTYKDESIKFPLKGTLGGARVQFDRDHLRRYPHKVESGNVGRIYFNMTVNIEPTESPVSKSLKIHRDDFPKVVNFKPKELTEWIKDSKGKKLKSGIESLEIGLRVMSIDLGQRQAAAASIFEVVDQKPDIEGKLFFPIKGTELYAVHRASFNIKLPGETLVKSREVLRKAREDNLKLMNQKLNFLRNVLHFQQFEDITEREKRVTKWISRQENSDVPLVYQDELIQIRELMYKPYKDWVAFLKQLHKRLEVEIGKEVKHWRKSLSDGRKGLYGISLKNIDEIDRTRKFLLRWSLRPTEPGEVRRLEPGQRFAIDQLNHLNALKEDRLKKMANTIIMHALGYCYDVRKKKWQAKNPACQIILFEDLSNYNPYEERSRFENSKLMKWSRREIPRQVALQGEIYGLQVGEVGAQFSSRFHAKTGSPGIRCSVVTKEKLQDNRFFKNLQREGRLTLDKIAVLKEGDLYPDKGGEKFISLSKDRKCVTTHADINAAQNLQKRFWTRTHGFYKVYCKAYQVDGQTVYIPESKDQKQKIIEEFGEGYFILKDGVYEWVNAGKLKIKKGSSKQSSSELVDSDILKDSFDLASELKGEKLMLYRDPSGNVFPSDKWMAAGVFFGKLERILISKLTNQYSISTIEDDSSKQSMKRPAATKKAGQAKKKKGSYPYDVPDYAYPYDVPDYAYPYDVPDYA

SEQ ID NO: 8 - DNA, 4092 bp, synthetic construct
  misc_feature 1..4092: note = BhCas12b GGSGGS-ABE8-Xten20at D980 polynucleotide sequence
  misc_feature 1..6: note = Kozak sequence
  misc_feature 7..57: note = Sequence encoding N-terminal nuclear localization signal (NLS)
  misc_feature 58..2997: note = Sequence encoding BhCas12b
  misc_feature 2998..3015: note = Sequence encoding a linker
  misc_feature 3016..3513: note = Sequence encoding TadA*8
  misc_feature 3514..3573: note = Sequence encoding Xten20 linker
  misc_feature 3574..3954: note = Sequence encoding BhCas12b
  misc_feature 3955..4002: note = Sequence encoding C-terminal NLS
  misc_feature 4003..4008: note = Sequence encoding a GS linker
  misc_feature 4009..4089: note = Sequence encoding 3x hemagglutinin (HA) tag
  source 1..4092: mol_type = other DNA
gccaccatggccccaaagaagaagcggaaggtcggtatccacggagtcccagcagccgccaccagatccttcatcctgaagatcgagcccaacgaggaagtgaagaaaggcctctggaaaacccacgaggtgctgaaccacggaatcgcctactacatgaatatcctgaagctgatccggcaagaggccatctacgagcaccacgagcaggaccccaagaatcccaagaaggtgtccaaggccgagatccaggccgagctgtgggatttcgtgctgaagatgcagaagtgcaacagcttcacacacgaggtggacaaggacgaggtgttcaacatcctgagagagctgtacgaggaactggtgcccagcagcgtggaaaagaagggcgaagccaaccagctgagcaacaagtttctgtaccctctggtggaccccaacagccagtctggaaagggaacagccagcagcggcagaaagcccagatggtacaacctgaagattgccggcgatccctcctgggaagaagagaagaagaagtgggaagaagataagaaaaaggacccgctggccaagatcctgggcaagctggctgagtacggactgatccctctgttcatcccctacaccgacagcaacgagcccatcgtgaaagaaatcaagtggatggaaaagtcccggaaccagagcgtgcggcggctggataaggacatgttcattcaggccctggaacggttcctgagctgggagagctggaacctgaaagtgaaagaggaatacgagaaggtcgagaaagagtacaagaccctggaagagaggatcaaagaggacatccaggctctgaaggctctggaacagtatgagaaagagcggcaagaacagctgctgcgggacaccctgaacaccaacgagtaccggctgagcaagagaggccttagaggctggcgggaaatcatccagaaatggctgaaaatggacgagaacgagccctccgagaagtacctggaagtgttcaaggactaccagcggaagcaccctagagaggccggcgattacagcgtgtacgagttcctgtccaagaaagagaaccacttcatctggcggaatcaccctgagtacccctacctgtacgccaccttctgcgagatcgacaagaaaaagaaggacgccaagcagcaggccaccttcacactggccgatcctatcaatcaccctctgtgggtccgattcgaggaaagaagcggcagcaacctgaacaagtacagaatcctgaccgagcagctgcacaccgagaagctgaagaaaaagctgacagtgcagctggaccggctgatctaccctacagaatctggcggctgggaagagaagggcaaagtggacattgtgctgctgcccagccggcagttctacaaccagatcttcctggacatcgaggaaaagggcaagcacgccttcacctacaaggatgagagcatcaagttccctctgaagggcacactcggcggagccagagtgcagttcgacagagatcacctgagaagataccctcacaaggtggaaagcggcaacgtgggcagaatctacttcaacatgaccgtgaacatcgagcctacagagtccccagtgtccaagtctctgaagatccaccgggacgacttccccaaggtggtcaacttcaagcccaaagaactgaccgagtggatcaaggacagcaagggcaagaaactgaagtccggcatcgagtccctggaaatcggcctgagagtgatgagcatcgacctgggacagagacaggccgctgccgcctctattttcgaggtggtggatcagaagcccgacatcgaaggcaagctgtttttcccaatcaagggcaccgagctgtatgccgtgcacagagccagcttcaacatcaagctgcccggcgagacactggtcaagagcagagaagtgctgcggaaggccagagaggacaatctgaaactgatgaaccagaagctcaacttcctgcggaacgtgctgcacttccagcagttcgaggacatcaccgagagagagaagcgggtcaccaagtggatcagcagacaagagaacagcgacgtgcccctggtgtaccaggatgagctgatccagatccgcgagctgatgtacaagccttacaaggactgggtcgccttcctgaagcagctccacaagagactggaagtcgagatcggcaaagaagtgaagcactggcggaagtccctgagcgacggaagaaagggcctgtacggcatctccctgaagaacatcgacgagatcgatcggacccggaagttcctgctgagatggtccctgaggcctaccgaacctggcgaagtgcgtagactggaacccggccagagattcgccatcgaccagctgaatcacctgaacgccctgaaagaagatcggctgaagaagatggccaacaccatcatcatgcacgccctgggctactgctacgacgtgcggaagaagaaatggcaggctaagaaccccgcctgccagatcatcctgttcgaggatctgagcaactacaacccctacgaggaaaggtcccgcttcgagaacagcaagctcatgaagtggtccagacgcgagatccccagacaggttgcactgcagggcgagatctatggcctgcaagtgggagaagtgggcgctcagttcagcagcagattccacgccaagacaggcagccctggcatcagatgtagcgtcgtgaccaaagagaagctgcaggacaatcggttcttcaagaatctgcagagagagggcagactgaccctggacaaaatcgccgtgctgaaagagggcgatctgtacccagacaaaggcggcgagaagttcatcagcctgagcaaggatcggaagtgcgtgaccacacacgccgacatcaacgccgctcagaacctgcagaagcggttctggacaagaacccacggcttctacaaggtgtactgcaaggcctaccaggtggacggaggctctggaggaagctccgaagtcgagttttcccatgagtactggatgagacacgcattgactctcgcaaagagggctcgagatgaacgcgaggtgcccgtgggggcagtactcgtgctcaacaatcgcgtaatcggcgaaggttggaatagggcaatcggactccacgaccccactgcacatgcggaaatcatggcccttcgacagggagggcttgtgatgcagaattatcgactttatgatgcgacgctgtacgtcacgtttgaaccttgcgtaatgtgcgcgggagctatgattcactcccgcattggacgagttgtattcggtgttcgcaacgccaagacgggtgccgcaggttcactgatggacgtgctgcatcatccaggcatgaaccaccgggtagaaatcacagaaggcatattggcggacgaatgtgcggcgctgttgtgtcgtttttttcgcatgcccaggcgggtctttaacgcccagaaaaaagcacaatcctctactgacggctcttctggatctgaaacacctggcacaagcgagagcgccacccctgagagctctggcggccagaccgtgtacatccctgagagcaaggaccagaagcagaagatcatcgaagagttcggcgagggctacttcattctgaaggacggggtgtacgaatgggtcaacgccggcaagctgaaaatcaagaagggcagctccaagcagagcagcagcgagctggtggatagcgacatcctgaaagacagcttcgacctggcctccgagctgaaaggcgaaaagctgatgctgtacagggaccccagcggcaatgtgttccccagcgacaaatggatggccgctggcgtgttcttcggaaagctggaacgcatcctgatcagcaagctgaccaaccagtactccatcagcaccatcgaggacgacagcagcaagcagtctatgaaaaggccggcggccacgaaaaaggccggccaggcaaaaaagaaaaagggatcctacccatacgatgttccagattacgcttatccctacgacgtgcctgattatgcatacccatatgatgtccccgactatgcctaa

SEQ ID NO: 9 - protein, 1361 aa, synthetic construct
  REGION 1..1361: note = BhCas12b GGSGGS-ABE8-Xten20at D980 polypeptide sequence
MAPKKKRKVGIHGVPAAATRSFILKIEPNEEVKKGLWKTHEVLNHGIAYYMNILKLIRQEAIYEHHEQDPKNPKKVSKAEIQAELWDFVLKMQKCNSFTHEVDKDEVFNILRELYEELVPSSVEKKGEANQLSNKFLYPLVDPNSQSGKGTASSGRKPRWYNLKIAGDPSWEEEKKKWEEDKKKDPLAKILGKLAEYGLIPLFIPYTDSNEPIVKEIKWMEKSRNQSVRRLDKDMFIQALERFLSWESWNLKVKEEYEKVEKEYKTLEERIKEDIQALKALEQYEKERQEQLLRDTLNTNEYRLSKRGLRGWREIIQKWLKMDENEPSEKYLEVFKDYQRKHPREAGDYSVYEFLSKKENHFIWRNHPEYPYLYATFCEIDKKKKDAKQQATFTLADPINHPLWVRFEERSGSNLNKYRILTEQLHTEKLKKKLTVQLDRLIYPTESGGWEEKGKVDIVLLPSRQFYNQIFLDIEEKGKHAFTYKDESIKFPLKGTLGGARVQFDRDHLRRYPHKVESGNVGRIYFNMTVNIEPTESPVSKSLKIHRDDFPKVVNFKPKELTEWIKDSKGKKLKSGIESLEIGLRVMSIDLGQRQAAAASIFEVVDQKPDIEGKLFFPIKGTELYAVHRASFNIKLPGETLVKSREVLRKAREDNLKLMNQKLNFLRNVLHFQQFEDITEREKRVTKWISRQENSDVPLVYQDELIQIRELMYKPYKDWVAFLKQLHKRLEVEIGKEVKHWRKSLSDGRKGLYGISLKNIDEIDRTRKFLLRWSLRPTEPGEVRRLEPGQRFAIDQLNHLNALKEDRLKKMANTIIMHALGYCYDVRKKKWQAKNPACQIILFEDLSNYNPYEERSRFENSKLMKWSRREIPRQVALQGEIYGLQVGEVGAQFSSRFHAKTGSPGIRCSVVTKEKLQDNRFFKNLQREGRLTLDKIAVLKEGDLYPDKGGEKFISLSKDRKCVTTHADINAAQNLQKRFWTRTHGFYKVYCKAYQVDGGSGGSSEVEFSHEYWMRHALTLAKRARDEREVPVGAVLVLNNRVIGEGWNRAIGLHDPTAHAEIMALRQGGLVMQNYRLYDATLYVTFEPCVMCAGAMIHSRIGRVVFGVRNAKTGAAGSLMDVLHHPGMNHRVEITEGILADECAALLCRFFRMPRRVFNAQKKAQSSTDGSSGSETPGTSESATPESSGGQTVYIPESKDQKQKIIEEFGEGYFILKDGVYEWVNAGKLKIKKGSSKQSSSELVDSDILKDSFDLASELKGEKLMLYRDPSGNVFPSDKWMAAGVFFGKLERILISKLTNQYSISTIEDDSSKQSMKRPAATKKAGQAKKKKGSYPYDVPDYAYPYDVPDYAYPYDVPDYA

SEQ ID NO: 10 - DNA, 4092 bp, synthetic construct
  misc_feature 1..4092: note = BhCas12b GGSGGS-ABE8-Xten20at K1019 polynucleotide sequence
  misc_feature 1..6: note = Kozak sequence
  misc_feature 7..57: note = Sequence encoding N-terminal nuclear localization signal (NLS)
  misc_feature 58..3114: note = Sequence encoding BhCas12b
  misc_feature 3115..3132: note = Sequence encoding a linker
  misc_feature 3133..3630: note = Sequence encoding TadA*8
  misc_feature 3631..3690: note = Sequence encoding Xten20 linker
  misc_feature 3691..3954: note = Sequence encoding BhCas12b
  misc_feature 3955..4002: note = Sequence encoding C-terminal NLS
  misc_feature 4003..4008: note = Sequence encoding GS linker
  misc_feature 4009..4089: note = Sequence encoding 3x hemagglutinin (HA) tag
  source 1..4092: mol_type = other DNA
gccaccatggccccaaagaagaagcggaaggtcggtatccacggagtcccagcagccgccaccagatccttcatcctgaagatcgagcccaacgaggaagtgaagaaaggcctctggaaaacccacgaggtgctgaaccacggaatcgcctactacatgaatatcctgaagctgatccggcaagaggccatctacgagcaccacgagcaggaccccaagaatcccaagaaggtgtccaaggccgagatccaggccgagctgtgggatttcgtgctgaagatgcagaagtgcaacagcttcacacacgaggtggacaaggacgaggtgttcaacatcctgagagagctgtacgaggaactggtgcccagcagcgtggaaaagaagggcgaagccaaccagctgagcaacaagtttctgtaccctctggtggaccccaacagccagtctggaaagggaacagccagcagcggcagaaagcccagatggtacaacctgaagattgccggcgatccctcctgggaagaagagaagaagaagtgggaagaagataagaaaaaggacccgctggccaagatcctgggcaagctggctgagtacggactgatccctctgttcatcccctacaccgacagcaacgagcccatcgtgaaagaaatcaagtggatggaaaagtcccggaaccagagcgtgcggcggctggataaggacatgttcattcaggccctggaacggttcctgagctgggagagctggaacctgaaagtgaaagaggaatacgagaaggtcgagaaagagtacaagaccctggaagagaggatcaaagaggacatccaggctctgaaggctctggaacagtatgagaaagagcggcaagaacagctgctgcgggacaccctgaacaccaacgagtaccggctgagcaagagaggccttagaggctggcgggaaatcatccagaaatggctgaaaatggacgagaacgagccctccgagaagtacctggaagtgttcaaggactaccagcggaagcaccctagagaggccggcgattacagcgtgtacgagttcctgtccaagaaagagaaccacttcatctggcggaatcaccctgagtacccctacctgtacgccaccttctgcgagatcgacaagaaaaagaaggacgccaagcagcaggccaccttcacactggccgatcctatcaatcaccctctgtgggtccgattcgaggaaagaagcggcagcaacctgaacaagtacagaatcctgaccgagcagctgcacaccgagaagctgaagaaaaagctgacagtgcagctggaccggctgatctaccctacagaatctggcggctgggaagagaagggcaaagtggacattgtgctgctgcccagccggcagttctacaaccagatcttcctggacatcgaggaaaagggcaagcacgccttcacctacaaggatgagagcatcaagttccctctgaagggcacactcggcggagccagagtgcagttcgacagagatcacctgagaagataccctcacaaggtggaaagcggcaacgtgggcagaatctacttcaacatgaccgtgaacatcgagcctacagagtccccagtgtccaagtctctgaagatccaccgggacgacttccccaaggtggtcaacttcaagcccaaagaactgaccgagtggatcaaggacagcaagggcaagaaactgaagtccggcatcgagtccctggaaatcggcctgagagtgatgagcatcgacctgggacagagacaggccgctgccgcctctattttcgaggtggtggatcagaagcccgacatcgaaggcaagctgtttttcccaatcaagggcaccgagctgtatgccgtgcacagagccagcttcaacatcaagctgcccggcgagacactggtcaagagcagagaagtgctgcggaaggccagagaggacaatctgaaactgatgaaccagaagctcaacttcctgcggaacgtgctgcacttccagcagttcgaggacatcaccgagagagagaagcgggtcaccaagtggatcagcagacaagagaacagcgacgtgcccctggtgtaccaggatgagctgatccagatccgcgagctgatgtacaagccttacaaggactgggtcgccttcctgaagcagctccacaagagactggaagtcgagatcggcaaagaagtgaagcactggcggaagtccctgagcgacggaagaaagggcctgtacggcatctccctgaagaacatcgacgagatcgatcggacccggaagttcctgctgagatggtccctgaggcctaccgaacctggcgaagtgcgtagactggaacccggccagagattcgccatcgaccagctgaatcacctgaacgccctgaaagaagatcggctgaagaagatggccaacaccatcatcatgcacgccctgggctactgctacgacgtgcggaagaagaaatggcaggctaagaaccccgcctgccagatcatcctgttcgaggatctgagcaactacaacccctacgaggaaaggtcccgcttcgagaacagcaagctcatgaagtggtccagacgcgagatccccagacaggttgcactgcagggcgagatctatggcctgcaagtgggagaagtgggcgctcagttcagcagcagattccacgccaagacaggcagccctggcatcagatgtagcgtcgtgaccaaagagaagctgcaggacaatcggttcttcaagaatctgcagagagagggcagactgaccctggacaaaatcgccgtgctgaaagagggcgatctgtacccagacaaaggcggcgagaagttcatcagcctgagcaaggatcggaagtgcgtgaccacacacgccgacatcaacgccgctcagaacctgcagaagcggttctggacaagaacccacggcttctacaaggtgtactgcaaggcctaccaggtggacggccagaccgtgtacatccctgagagcaaggaccagaagcagaagatcatcgaagagttcggcgagggctacttcattctgaaggacggggtgtacgaatgggtcaacgccggcaagggaggctctggaggaagctccgaagtcgagttttcccatgagtactggatgagacacgcattgactctcgcaaagagggctcgagatgaacgcgaggtgcccgtgggggcagtactcgtgctcaacaatcgcgtaatcggcgaaggttggaatagggcaatcggactccacgaccccactgcacatgcggaaatcatggcccttcgacagggagggcttgtgatgcagaattatcgactttatgatgcgacgctgtacgtcacgtttgaaccttgcgtaatgtgcgcgggagctatgattcactcccgcattggacgagttgtattcggtgttcgcaacgccaagacgggtgccgcaggttcactgatggacgtgctgcatcatccaggcatgaaccaccgggtagaaatcacagaaggcatattggcggacgaatgtgcggcgctgttgtgtcgtttttttcgcatgcccaggcgggtctttaacgcccagaaaaaagcacaatcctctactgacggctcttctggatctgaaacacctggcacaagcgagagcgccacccctgagagctctggcctgaaaatcaagaagggcagctccaagcagagcagcagcgagctggtggatagcgacatcctgaaagacagcttcgacctggcctccgagctgaaaggcgaaaagctgatgctgtacagggaccccagcggcaatgtgttccccagcgacaaatggatggccgctggcgtgttcttcggaaagctggaacgcatcctgatcagcaagctgaccaaccagtactccatcagcaccatcgaggacgacagcagcaagcagtctatgaaaaggccggcggccacgaaaaaggccggccaggcaaaaaagaaaaagggatcctacccatacgatgttccagattacgcttatccctacgacgtgcctgattatgcatacccatatgatgtccccgactatgcctaa

SEQ ID NO: 11 - protein, 1361 aa, synthetic construct
  REGION 1..1361: note = BhCas12b GGSGGS-ABE8-Xten20at K1019 polypeptide sequence
MAPKKKRKVGIHGVPAAATRSFILKIEPNEEVKKGLWKTHEVLNHGIAYYMNILKLIRQEAIYEHHEQDPKNPKKVSKAEIQAELWDFVLKMQKCNSFTHEVDKDEVFNILRELYEELVPSSVEKKGEANQLSNKFLYPLVDPNSQSGKGTASSGRKPRWYNLKIAGDPSWEEEKKKWEEDKKKDPLAKILGKLAEYGLIPLFIPYTDSNEPIVKEIKWMEKSRNQSVRRLDKDMFIQALERFLSWESWNLKVKEEYEKVEKEYKTLEERIKEDIQALKALEQYEKERQEQLLRDTLNTNEYRLSKRGLRGWREIIQKWLKMDENEPSEKYLEVFKDYQRKHPREAGDYSVYEFLSKKENHFIWRNHPEYPYLYATFCEIDKKKKDAKQQATFTLADPINHPLWVRFEERSGSNLNKYRILTEQLHTEKLKKKLTVQLDRLIYPTESGGWEEKGKVDIVLLPSRQFYNQIFLDIEEKGKHAFTYKDESIKFPLKGTLGGARVQFDRDHLRRYPHKVESGNVGRIYFNMTVNIEPTESPVSKSLKIHRDDFPKVVNFKPKELTEWIKDSKGKKLKSGIESLEIGLRVMSIDLGQRQAAAASIFEVVDQKPDIEGKLFFPIKGTELYAVHRASFNIKLPGETLVKSREVLRKAREDNLKLMNQKLNFLRNVLHFQQFEDITEREKRVTKWISRQENSDVPLVYQDELIQIRELMYKPYKDWVAFLKQLHKRLEVEIGKEVKHWRKSLSDGRKGLYGISLKNIDEIDRTRKFLLRWSLRPTEPGEVRRLEPGQRFAIDQLNHLNALKEDRLKKMANTIIMHALGYCYDVRKKKWQAKNPACQIILFEDLSNYNPYEERSRFENSKLMKWSRREIPRQVALQGEIYGLQVGEVGAQFSSRFHAKTGSPGIRCSVVTKEKLQDNRFFKNLQREGRLTLDKIAVLKEGDLYPDKGGEKFISLSKDRKCVTTHADINAAQNLQKRFWTRTHGFYKVYCKAYQVDGQTVYIPESKDQKQKIIEEFGEGYFILKDGVYEWVNAGKGGSGGSSEVEFSHEYWMRHALTLAKRARDEREVPVGAVLVLNNRVIGEGWNRAIGLHDPTAHAEIMALRQGGLVMQNYRLYDATLYVTFEPCVMCAGAMIHSRIGRVVFGVRNAKTGAAGSLMDVLHHPGMNHRVEITEGILADECAALLCRFFRMPRRVFNAQKKAQSSTDGSSGSETPGTSESATPESSGLKIKKGSSKQSSSELVDSDILKDSFDLASELKGEKLMLYRDPSGNVFPSDKWMAAGVFFGKLERILISKLTNQYSISTIEDDSSKQSMKRPAATKKAGQAKKKKGSYPYDVPDYAYPYDVPDYAYPYDVPDYA

SEQ ID NO: 12 - protein, 208 aa, Petromyzon marinus
  REGION 1..208: note = MISC_FEATURE - tr|A5H718|A5H718_PETMA Cytosine deaminase OS=Petromyzon marinusOX=7757 PE=2 SV=1 amino acid sequence; PmCDA1 polypeptide sequence
MTDAEYVRIHEKLDIYTFKKQFFNNKKSVSHRCYVLFELKRRGERRACFWGYAVNKPQSGTERGIHAEIFSIRKVEEYLRDNPGQFTINWYSSWSPCADCAEKILEWYNQELRGNGHTLKIWACKLYYEKNARNQIGLWNLRDNGVGLNVMVSEHYQCCRKIFIQSSHNQLNENRWLEKTLKRAEKRRSELSIMIQVKILHTTKSPAV

SEQ ID NO: 13 - DNA, 766 bp, Petromyzon marinus
  misc_feature 1..766: note = EF094822.1 Petromyzon marinus isolate PmCDA.21 cytosine deaminase mRNA, complete cds; PmCDA1 polynucleotide sequence
  source 1..766: mol_type = genomic DNA
tgacacgacacagccgtgtatatgaggaagggtagctggatggggggggggggaatacgttcagagaggacattagcgagcgtcttgttggtggccttgagtctagacacctgcagacatgaccgacgctgagtacgtgagaatccatgagaagttggacatctacacgtttaagaaacagtttttcaacaacaaaaaatccgtgtcgcatagatgctacgttctctttgaattaaaacgacggggtgaacgtagagcgtgtttttggggctatgctgtgaataaaccacagagcgggacagaacgtggaattcacgccgaaatctttagcattagaaaagtcgaagaatacctgcgcgacaaccccggacaattcacgataaattggtactcatcctggagtccttgtgcagattgcgctgaaaagatcttagaatggtataaccaggagctgcgggggaacggccacactttgaaaatctgggcttgcaaactctattacgagaaaaatgcgaggaatcaaattgggctgtggaacctcagagataacggggttgggttgaatgtaatggtaagtgaacactaccaatgttgcaggaaaatattcatccaatcgtcgcacaatcaattgaatgagaatagatggcttgagaagactttgaagcgagctgaaaaacgacggagcgagttgtccattatgattcaggtaaaaatactccacaccactaagagtcctgctgtttaagaggctatgcggatggttttc

SEQ ID NO: 14 - protein, 145 aa, Homo sapiens
  REGION 1..145: note = MISC_FEATURE - tr|Q6QJ80|Q6QJ80_HUMAN Activation-induced cytidine deaminase OS=Homo sapiens; OX = 9606 GN=AICDA PE=2 SV=1; AID polypeptide sequence
MDSLLMNRRKFLYQFKNVRWAKGRRETYLCYVVKRRDSATSFSLDFGYLRNKNGCHVELLFLRYISDWDLDPGRCYRVTWFTSWSPCYDCARHVADFLRGNPNLSLRIFTARLYFCEDRKAEPEGLRRLHRAGVQIAIMTFKAPV

SEQ ID NO: 15 - DNA, 10681 bp, Homo sapiens
  misc_feature 1..10681: note = NG_011588.1:5001-15681 Homo sapiens activation induced cytidine deaminase (AICDA), RefSeqGene (LRG_17) on chromosome 12; nucleic acid sequence of the CDS of human AID; polynucleotide sequence
  source 1..10681: mol_type = genomic DNA
agagaaccatcattaattgaagtgagatttttctggcctgagacttgcagggaggcaagaagacactctggacaccactatggacaggtaaagaggcagtcttctcgtgggtgattgcactggccttcctctcagagcaaatctgagtaatgagactggtagctatccctttctctcatgtaactgtctgactgataagatcagcttgatcaatatgcatatatattttttgatctgtctccttttcttctattcagatcttatacgctgtcagcccaattctttctgtttcagacttctcttgatttccctctttttcatgtggcaaaagaagtagtgcgtacaatgtactgattcgtcctgagatttgtaccatggttgaaactaatttatggtaataatattaacatagcaaatctttagagactcaaatcatgaaaaggtaatagcagtactgtactaaaaacggtagtgctaattttcgtaataattttgtaaatattcaacagtaaaacaacttgaagacacactttcctagggaggcgttactgaaataatttagctatagtaagaaaatttgtaattttagaaatgccaagcattctaaattaattgcttgaaagtcactatgattgtgtccattataaggagacaaattcattcaagcaagttatttaatgttaaaggcccaattgttaggcagttaatggcacttttactattaactaatctttccatttgttcagacgtagcttaacttacctcttaggtgtgaatttggttaaggtcctcataatgtctttatgtgcagtttttgataggttattgtcatagaacttattctattcctacatttatgattactatggatgtatgagaataacacctaatccttatactttacctcaatttaactcctttataaagaacttacattacagaataaagattttttaaaaatatatttttttgtagagacagggtcttagcccagccgaggctggtctctaagtcctggcccaagcgatcctcctgcctgggcctcctaaagtgctggaattatagacatgagccatcacatccaatatacagaataaagatttttaatggaggatttaatgttcttcagaaaattttcttgaggtcagacaatgtcaaatgtctcctcagtttacactgagattttgaaaacaagtctgagctataggtccttgtgaagggtccattggaaatacttgttcaaagtaaaatggaaagcaaaggtaaaatcagcagttgaaattcagagaaagacagaaaaggagaaaagatgaaattcaacaggacagaagggaaatatattatcattaaggaggacagtatctgtagagctcattagtgatggcaaaatgacttggtcaggattatttttaacccgcttgtttctggtttgcacggctggggatgcagctagggttctgcctcagggagcacagctgtccagagcagctgtcagcctgcaagcctgaaacactccctcggtaaagtccttcctactcaggacagaaatgacgagaacagggagctggaaacaggcccctaaccagagaagggaagtaatggatcaacaaagttaactagcaggtcaggatcacgcaattcatttcactctgactggtaacatgtgacagaaacagtgtaggcttattgtattttcatgtagagtaggacccaaaaatccacccaaagtcctttatctatgccacatccttcttatctatacttccaggacactttttcttccttatgataaggctctctctctctccacacacacacacacacacacacacacacacacacacacacacacaaacacacaccccgccaaccaaggtgcatgtaaaaagatgtagattcctctgcctttctcatctacacagcccaggagggtaagttaatataagagggatttattggtaagagatgatgcttaatctgtttaacactgggcctcaaagagagaatttcttttcttctgtacttattaagcacctattatgtgttgagcttatatatacaaagggttattatatgctaatatagtaatagtaatggtggttggtactatggtaattaccataaaaattattatccttttaaaataaagctaattattattggatcttttttagtattcattttatgttttttatgtttttgattttttaaaagacaatctcaccctgttacccaggctggagtgcagtggtgcaatcatagctttctgcagtcttgaactcctgggctcaagcaatcctcctgccttggcctcccaaagtgttgggatacagtcatgagccactgcatctggcctaggatccatttagattaaaatatgcattttaaattttaaaataatatggctaatttttaccttatgtaatgtgtatactggcaataaatctagtttgctgcctaaagtttaaagtgctttccagtaagcttcatgtacgtgaggggagacatttaaagtgaaacagacagccaggtgtggtggctcacgcctgtaatcccagcactctgggaggctgaggtgggtggatcgcttgagccctggagttcaagaccagcctgagcaacatggcaaaacgctgtttctataacaaaaattagccgggcatggtggcatgtgcctgtggtcccagctactagggggctgaggcaggagaatcgttggagcccaggaggtcaaggctgcactgagcagtgcttgcgccactgcactccagcctgggtgacaggaccagaccttgcctcaaaaaaataagaagaaaaattaaaaataaatggaaacaactacaaagagctgttgtcctagatgagctacttagttaggctgatattttggtatttaacttttaaagtcagggtctgtcacctgcactacattattaaaatatcaattctcaatgtatatccacacaaagactggtacgtgaatgttcatagtacctttattcacaaaaccccaaagtagagactatccaaatatccatcaacaagtgaacaaataaacaaaatgtgctatatccatgcaatggaataccaccctgcagtacaaagaagctacttggggatgaatcccaaagtcatgacgctaaatgaaagagtcagacatgaaggaggagataatgtatgccatacgaaattctagaaaatgaaagtaacttatagttacagaaagcaaatcagggcaggcatagaggctcacacctgtaatcccagcactttgagaggccacgtgggaagattgctagaactcaggagttcaagaccagcctgggcaacacagtgaaactccattctccacaaaaatgggaaaaaaagaaagcaaatcagtggttgtcctgtggggaggggaaggactgcaaagagggaagaagctctggtggggtgagggtggtgattcaggttctgtatcctgactgtggtagcagtttggggtgtttacatccaaaaatattcgtagaattatgcatcttaaatgggtggagtttactgtatgtaaattatacctcaatgtaagaaaaaataatgtgtaagaaaactttcaattctcttgccagcaaacgttattcaaattcctgagccctttacttcgcaaattctctgcacttctgccccgtaccattaggtgacagcactagctccacaaattggataaatgcatttctggaaaagactagggacaaaatccaggcatcacttgtgctttcatatcaaccatgctgtacagcttgtgttgctgtctgcagctgcaatggggactcttgatttctttaaggaaacttgggttaccagagtatttccacaaatgctattcaaattagtgcttatgatatgcaagacactgtgctaggagccagaaaacaaagaggaggagaaatcagtcattatgtgggaacaacatagcaagatatttagatcattttgactagttaaaaaagcagcagagtacaaaatcacacatgcaatcagtataatccaaatcatgtaaatatgtgcctgtagaaagactagaggaataaacacaagaatcttaacagtcattgtcattagacactaagtctaattattattattagacactatgatatttgagatttaaaaaatctttaatattttaaaatttagagctcttctatttttccatagtattcaagtttgacaatgatcaagtattactctttctttttttttttttttttttttttttgagatggagttttggtcttgttgcccatgctggagtggaatggcatgaccatagctcactgcaacctccacctcctgggttcaagcaaagctgtcgcctcagcctcccgggtagatgggattacaggcgcccaccaccacactcggctaatgtttgtatttttagtagagatggggtttcaccatgttggccaggctggtctcaaactcctgacctcagaggatccacctgcctcagcctcccaaagtgctgggattacagatgtaggccactgcgcccggccaagtattgctcttatacattaaaaaacaggtgtgagccactgcgcccagccaggtattgctcttatacattaaaaaataggccggtgcagtggctcacgcctgtaatcccagcactttgggaagccaaggcgggcagaacacccgaggtcaggagtccaaggccagcctggccaagatggtgaaaccccgtctctattaaaaatacaaacattacctgggcatgatggtgggcgcctgtaatcccagctactcaggaggctgaggcaggaggatccgcggagcctggcagatctgcctgagcctgggaggttgaggctacagtaagccaagatcatgccagtatacttcagcctgggcgacaaagtgagaccgtaacaaaaaaaaaaaaatttaaaaaaagaaatttagatcaagatccaactgtaaaaagtggcctaaacaccacattaaagagtttggagtttattctgcaggcagaagagaaccatcagggggtcttcagcatgggaatggcatggtgcacctggtttttgtgagatcatggtggtgacagtgtggggaatgttattttggagggactggaggcagacagaccggttaaaaggccagcacaacagataaggaggaagaagatgagggcttggaccgaagcagagaagagcaaacagggaaggtacaaattcaagaaatattggggggtttgaatcaacacatttagatgattaattaaatatgaggactgaggaataagaaatgagtcaaggatggttccaggctgctaggctgcttacctgaggtggcaaagtcgggaggagtggcagtttaggacagggggcagttgaggaatattgttttgatcattttgagtttgaggtacaagttggacacttaggtaaagactggaggggaaatctgaatatacaattatgggactgaggaacaagtttattttattttttgtttcgttttcttgttgaagaacaaatttaattgtaatcccaagtcatcagcatctagaagacagtggcaggaggtgactgtcttgtgggtaagggtttggggtccttgatgagtatctctcaattggccttaaatataagcaggaaaaggagtttatgatggattccaggctcagcagggctcaggagggctcaggcagccagcagaggaagtcagagcatcttctttggtttagcccaagtaatgacttccttaaaaagctgaaggaaaatccagagtgaccagattataaactgtactcttgcattttctctccctcctctcacccacagcctcttgatgaaccggaggaagtttctttaccaattcaaaaatgtccgctgggctaagggtcggcgtgagacctacctgtgctacgtagtgaagaggcgtgacagtgctacatccttttcactggactttggttatcttcgcaataaggtatcaattaaagtcggctttgcaagcagtttaatggtcaactgtgagtgcttttagagccacctgctgatggtattacttccatccttttttggcatttgtgtctctatcacattcctcaaatccttttttttatttctttttccatgtccatgcacccatattagacatggcccaaaatatgtgatttaattcctccccagtaatgctgggcaccctaataccactccttccttcagtgccaagaacaactgctcccaaactgtttaccagctttcctcagcatctgaattgcctttgagattaattaagctaaaagcatttttatatgggagaatattatcagcttgtccaagcaaaaattttaaatgtgaaaaacaaattgtgtcttaagcatttttgaaaattaaggaagaagaatttgggaaaaaattaacggtggctcaattctgtcttccaaatgatttcttttccctcctactcacatgggtcgtaggccagtgaatacattcaacatggtgatccccagaaaactcagagaagcctcggctgatgattaattaaattgatctttcggctacccgagagaattacatttccaagagacttcttcaccaaaatccagatgggtttacataaacttctgcccacgggtatctcctctctcctaacacgctgtgacgtctgggcttggtggaatctcagggaagcatccgtggggtggaaggtcatcgtctggctcgttgtttgatggttatattaccatgcaattttctttgcctacatttgtattgaatacatcccaatctccttcctattcggtgacatgacacattctatttcagaaggctttgattttatcaagcactttcatttacttctcatggcagtgcctattacttctcttacaatacccatctgtctgctttaccaaaatctatttccccttttcagatcctcccaaatggtcctcataaactgtcctgcctccacctagtggtccaggtatatttccacaatgttacatcaacaggcacttctagccattttccttctcaaaaggtgcaaaaagcaacttcataaacacaaattaaatcttcggtgaggtagtgtgatgctgcttcctcccaactcagcgcacttcgtcttcctcattccacaaaaacccatagccttccttcactctgcaggactagtgctgccaagggttcagctctacctactggtgtgctcttttgagcaagttgcttagcctctctgtaacacaaggacaatagctgcaagcatccccaaagatcattgcaggagacaatgactaaggctaccagagccgcaataaaagtcagtgaattttagcgtggtcctctctgtctctccagaacggctgccacgtggaattgctcttcctccgctacatctcggactgggacctagaccctggccgctgctaccgcgtcacctggttcacctcctggagcccctgctacgactgtgcccgacatgtggccgactttctgcgagggaaccccaacctcagtctgaggatcttcaccgcgcgcctctacttctgtgaggaccgcaaggctgagcccgaggggctgcggcggctgcaccgcgccggggtgcaaatagccatcatgaccttcaaaggtgcgaaagggccttccgcgcaggcgcagtgcagcagcccgcattcgggattgcgatgcggaatgaatgagttagtggggaagctcgaggggaagaagtgggcggggattctggttcacctctggagccgaaattaaagattagaagcagagaaaagagtgaatggctcagagacaaggccccgaggaaatgagaaaatggggccagggttgcttctttcccctcgatttggaacctgaactgtcttctacccccatatccccgcctttttttcctttttttttttttgaagattatttttactgctggaatacttttgtagaaaaccacgaaagaactttcaaagcctgggaagggctgcatgaaaattcagttcgtctctccagacagcttcggcgcatccttttggtaaggggcttcctcgctttttaaattttctttctttctctacagtcttttttggagtttcgtatatttcttatattttcttattgttcaatcactctcagttttcatctgatgaaaactttatttctcctccacatcagctttttcttctgctgtttcaccattcagagccctctgctaaggttccttttccctcccttttctttcttttgttgtttcacatctttaaatttctgtctctccccagggttgcgtttccttcctggtcagaattcttttctcctttttttttttttttttttttttttttaaacaaacaaacaaaaaacccaaaaaaactctttcccaatttactttcttccaacatgttacaaagccatccactcagtttagaagactctccggccccaccgacccccaacctcgttttgaagccattcactcaatttgcttctctctttctctacagcccctgtatgaggttgatgacttacgagacgcatttcgtactttgggactttgatagcaacttccaggaatgtcacacacgatgaaatatctctgctgaagacagtggataaaaaacagtccttcaagtcttctctgtttttattcttcaactctcactttcttagagtttacagaaaaaatatttatatacgactctttaaaaagatctatgtcttgaaaatagagaaggaacacaggtctggccagggacgtgctgcaattggtgcagttttgaatgcaacattgtcccctactgggaataacagaactgcaggacctgggagcatcctaaagtgtcaacgtttttctatgacttttaggtaggatgagagcagaaggtagatcctaaaaagcatggtgagaggatcaaatgtttttatatcaacatcctttattatttgattcatttgagttaacagtggtgttagtgatagatttttctattcttttcccttgacgtttactttcaagtaacacaaactcttccatcaggccatgatctataggacctcctaatgagagtatctgggtgattgtgaccccaaaccatctctccaaagcattaatatccaatcatgcgctgtatgttttaatcagcagaagcatgtttttatgtttgtacaaaagaagattgttatgggtggggatggaggtatagaccatgcatggtcaccttcaagctactttaataaaggatcttaaaatgggcaggaggactgtgaacaagacaccctaataatgggttgatgtctgaagtagcaaatcttctggaaacgcaaactcttttaaggaagtccctaatttagaaacacccacaaacttcacatatcataattagcaaacaattggaaggaagttgcttgaatgttggggagaggaaaatctattggctctcgtgggtctcttcatctcagaaatgccaatcaggtcaaggtttgctacattttgtatgtgtgtgatgcttctcccaaaggtatattaactatataagagagttgtgacaaaacagaatgataaagctgcgaaccgtggcacacgctcatagttctagctgcttgggaggttgaggagggaggatggcttgaacacaggtgttcaaggccagcctgggcaacataacaagatcctgtctctcaaaaaaaaaaaaaaaaaaaagaaagagagagggccgggcgtggtggctcacgcctgtaatcccagcactttgggaggccgagccgggcggatcacctgtggtcaggagtttgagaccagcctggccaacatggcaaaaccccgtctgtactcaaaatgcaaaaattagccaggcgtggtagcaggcacctgtaatcccagctacttgggaggctgaggcaggagaatcgcttgaacccaggaggtggaggttgcagtaagctgagatcgtgccgttgcactccagcctgggcgacaagagcaagactctgtctcagaaaaaaaaaaaaaaaagagagagagagagaaagagaacaatatttgggagagaaggatggggaagcattgcaaggaaattgtgctttatccaacaaaatgtaaggagccaataagggatccctatttgtctcttttggtgtctatttgtccctaacaactgtctttgacagtgagaaaaatattcagaataaccatatccctgtgccgttattacctagcaacccttgcaatgaagatgagcagatccacaggaaaacttgaatgcacaactgtcttattttaatcttattgtacataagtttgtaaaagagttaaaaattgttacttcatgtattcatttatattttatattattttgcgtctaatgattttttattaacatgatttccttttctgatatattgaaatggagtctcaaagcttcataaatttataactttagaaatgattctaataacaacgtatgtaattgtaacattgcagtaatggtgctacgaagccatttctcttgatttttagtaaacttttatgacagcaaatttgcttctggctcactttcaatcagttaaataaatgataaataattttggaagctgtgaagataaaataccaaataaaataatataaaagtgatttatatgaagttaaaataaaaaatcagtatgatggaataaacttg

SEQ ID NO: 16 - protein, 198 aa, Homo sapiens [sequence omitted]

SEQ ID NO: 17 - protein, 198 aa, Canis lupus
  REGION 1..198: note = MISC_FEATURE - Canine AID (clAID) polypeptide sequence
  REGION 1..30: note = MISC_FEATURE - Nuclear localization sequence
  REGION 183..198: note = MISC_FEATURE - Nuclear export signal
MDSLLMKQRKFLYHFKNVRWAKGRHETYLCYVVKRRDSATSFSLDFGHLRNKSGCHVELLFLRYISDWDLDPGRCYRVTWFTSWSPCYDCARHVADFLRGYPNLSLRIFAARLYFCEDRKAEPEGLRRLHRAGVQIAIMTFKDYFYCWNTFVENREKTFKAWEGLHENSVRLSRQLRRILLPLYEVDDLRDAFRTLGL

SEQ ID NO: 18 - protein, 199 aa, Bos taurus
  REGION 1..199: note = MISC_FEATURE - Bovine AID (btAID) polypeptide sequence
  REGION 1..30: note = MISC_FEATURE - Nuclear localization sequence
  REGION 183..199: note = MISC_FEATURE - Nuclear export signal
MDSLLKKQRQFLYQFKNVRWAKGRHETYLCYVVKRRDSPTSFSLDFGHLRNKAGCHVELLFLRYISDWDLDPGRCYRVTWFTSWSPCYDCARHVADFLRGYPNLSLRIFTARLYFCDKERKAEPEGLRRLHRAGVQIAIMTFKDYFYCWNTFVENHERTFKAWEGLHENSVRLSRQLRRILLPLYEVDDLRDAFRTLGL

SEQ ID NO: 19 - protein, 239 aa, Rattus sp.
  REGION 1..239: note = MISC_FEATURE - Rat AID polypeptide sequence
  REGION 1..26: note = MISC_FEATURE - Nuclear localization sequence
  REGION 194..239: note = MISC_FEATURE - Nuclear export signal
MAVGSKPKAALVGPHWERERIWCFLCSTGLGTQQTGQTSRWLRPAATQDPVSPPRSLLMKQRKFLYHFKNVRWAKGRHETYLCYVVKRRDSATSFSLDFGYLRNKSGCHVELLFLRYISDWDLDPGRCYRVTWFTSWSPCYDCARHVADFLRGNPNLSLRIFTARLTGWGALPAGLMSPARPSDYFYCWNTFVENHERTFKAWEGLHENSVRLSRRLRRILLPLYEVDDLRDAFRTLGL

SEQ ID NO: 20 - protein, 198 aa, Mus musculus [sequence omitted]

SEQ ID NO: 21 - protein, 229 aa, Rattus norvegicus [sequence omitted]

SEQ ID NO: 22 - protein, 229 aa, Mesocricetus auratus
  REGION 1..229: note = MISC_FEATURE - maAPOBEC-1 polypeptide sequence
MSSETGPVVVDPTLRRRIEPHEFDAFFDQGELRKETCLLYEIRWGGRHNIWRHTGQNTSRHVEINFIEKFTSERYFYPSTRCSIVWFLSWSPCGECSKAITEFLSGHPNVTLFIYAARLYHHTDQRNRQGLRDLISRGVTIRIMTEQEYCYCWRNFVNYPPSNEVYWPRYPNLWMRLYALELYCIHLGLPPCLKIKRRHQYPLTFFRLNLQSCHYQRIPPHILWATGFI

SEQ ID NO: 23 - protein, 236 aa, Pongo pygmaeus
  REGION 1..236: note = MISC_FEATURE - ppAPOBEC-1 polypeptide sequence
MTSEKGPSTGDPTLRRRIESWEFDVFYDPRELRKETCLLYEIKWGMSRKIWRSSGKNTTNHVEVNFIKKFTSERRFHSSISCSITWFLSWSPCWECSQAIREFLSQHPGVTLVIYVARLFWHMDQRNRQGLRDLVNSGVTIQIMRASEYYHCWRNFVNYPPGDEAHWPQYPPLWMMLYALELHCIILSLPPCLKISRRWQNHLAFFRLHLQNCHYQTIPPHILLATGLIHPSVTWR

SEQ ID NO: 24 - protein, 236 aa, Oryctolagus cuniculus
  REGION 1..236: note = MISC_FEATURE - ocAPOBEC1 polypeptide sequence
MASEKGPSNKDYTLRRRIEPWEFEVFFDPQELRKEACLLYEIKWGASSKTWRSSGKNTTNHVEVNFLEKLTSEGRLGPSTCCSITWFLSWSPCWECSMAIREFLSQHPGVTLIIFVARLFQHMDRRNRQGLKDLVTSGVTVRVMSVSEYCYCWENFVNYPPGKAAQWPRYPPRWMLMYALELYCIILGLPPCLKISRRHQKQLTFFSLTPQYCHYKMIPPYILLATGLLQPSVPWR

SEQ ID NO: 25 - protein, 235 aa, Monodelphis domestica
  REGION 1..235: note = MISC_FEATURE - mdAPOBEC-1 polypeptide sequence
MNSKTGPSVGDATLRRRIKPWEFVAFFNPQELRKETCLLYEIKWGNQNIWRHSNQNTSQHAEINFMEKFTAERHFNSSVRCSITWFLSWSPCWECSKAIRKFLDHYPNVTLAIFISRLYWHMDQQHRQGLKELVHSGVTIQIMSYSEYHYCWRNFVDYPQGEEDYWPKYPYLWIMLYVLELHCIILGLPPCLKISGSHSNQLALFSLDLQDCHYQKIPYNVLVATGLVQPFVTWR

SEQ ID NO: 26 - protein, 224 aa, Pongo pygmaeus
  REGION 1..224: note = MISC_FEATURE - ppAPOBEC-2 polypeptide sequence
MAQKEEAAAATEAASQNGEDLENLDDPEKLKELIELPPFEIVTGERLPANFFKFQFRNVEYSSGRNKTFLCYVVEAQGKGGQVQASRGYLEDEHAAAHAEEAFFNTILPAFDPALRYNVTWYVSSSPCAACADRIIKTLSKTKNLRLLILVGRLFMWEELEIQDALKKLKEAGCKLRIMKPQDFEYVWQNFVEQEEGESKAFQPWEDIQENFLYYEEKLADILK

SEQ ID NO: 27 - protein, 224 aa, Bos taurus
  REGION 1..224: note = MISC_FEATURE - btAPOBEC-2 polypeptide sequence
MAQKEEAAAAAEPASQNGEEVENLEDPEKLKELIELPPFEIVTGERLPAHYFKFQFRNVEYSSGRNKTFLCYVVEAQSKGGQVQASRGYLEDEHATNHAEEAFFNSIMPTFDPALRYMVTWYVSSSPCAACADRIVKTLNKTKNLRLLILVGRLFMWEEPEIQAALRKLKEAGCRLRIMKPQDFEYIWQNFVEQEEGESKAFEPWEDIQENFLYYEEKLADILK

SEQ ID NO: 28 - protein, 440 aa, Mus musculus
  REGION 1..440: note = MISC_FEATURE - mAPOBEC-3-(1) polypeptide sequence
MQPQRLGPRAGMGPFCLGCSHRKCYSPIRNLISQETFKFHFKNLGYAKGRKDTFLCYEVTRKDCDSPVSLHHGVFKNKDNIHAEICFLYWFHDKVLKVLSPREEFKITWYMSWSPCFECAEQIVRFLATHHNLSLDIFSSRLYNVQDPETQQNLCRLVQEGAQVAAMDLYEFKKCWKKFVDNGGRRFRPWKRLLTNFRYQDSKLQEILRPCYISVPSSSSSTLSNICLTKGLPETRFWVEGRRMDPLSEEEFYSQFYNQRVKHLCYYHRMKPYLCYQLEQFNGQAPLKGCLLSEKGKQHAEILFLDKIRSMELSQVTITCYLTWSPCPNCAWQLAAFKRDRPDLILHIYTSRLYFHWKRPFQKGLCSLWQSGILVDVMDLPQFTDCWTNFVNPKRPFWPWKGLEIISRRTQRRLRRIKESWGLQDLVNDFGNLQLGPPMS

SEQ ID NO: 29 - protein, 429 aa, Mus musculus
  REGION 1..429: note = MISC_FEATURE - APOBEC-3-(2) (Mouse APOBEC-3) polypeptide sequence
  REGION 71..108: note = MISC_FEATURE - Nucleic acid editing domain
  REGION 288..319: note = MISC_FEATURE - Nucleic acid editing domain
MGPFCLGCSHRKCYSPIRNLISQETFKFHFKNLGYAKGRKDTFLCYEVTRKDCDSPVSLHHGVFKNKDNIHAEICFLYWFHDKVLKVLSPREEFKITWYMSWSPCFECAEQIVRFLATHHNLSLDIFSSRLYNVQDPETQQNLCRLVQEGAQVAAMDLYEFKKCWKKFVDNGGRRFRPWKRLLTNFRYQDSKLQEILRPCYIPVPSSSSSTLSNICLTKGLPETRFCVEGRRMDPLSEEEFYSQFYNQRVKHLCYYHRMKPYLCYQLEQFNGQAPLKGCLLSEKGKQHAEILFLDKIRSMELSQVTITCYLTWSPCPNCAWQLAAFKRDRPDLILHIYTSRLYFHWKRPFQKGLCSLWQSGILVDVMDLPQFTDCWTNFVNPKRPFWPWKGLEIISRRTQRRLRRIKESWGLQDLVNDFGNLQLGPPMS

SEQ ID NO: 30 - protein, 430 aa, Rattus sp.
  REGION 1..430: note = MISC_FEATURE - APOBEC-3 polypeptide sequence
  REGION 72..109: note = MISC_FEATURE - Nucleic acid editing domain
  REGION 289..320: note = MISC_FEATURE - Nucleic acid editing domain
MGPFCLGCSHRKCYSPIRNLISQETFKFHFKNRLRYAIDRKDTFLCYEVTRKDCDSPVSLHHGVFKNKDNIHAEICFLYWFHDKVLKVLSPREEFKITWYMSWSPCFECAEQVLRFLATHHNLSLDIFSSRLYNIRDPENQQNLCRLVQEGAQVAAMDLYEFKKCWKKFVDNGGRRFRPWKKLLTNFRYQDSKLQEILRPCYIPVPSSSSSTLSNICLTKGLPETRFCVERRRVHLLSEEEFYSQFYNQRVKHLCYYHGVKPYLCYQLEQFNGQAPLKGCLLSEKGKQHAEILFLDKIRSMELSQVIITCYLTWSPCPNCAWQLAAFKRDRPDLILHIYTSRLYFHWKRPFQKGLCSLWQSGILVDVMDLPQFTDCWTNFVNPKRPFWPWKGLEIISRRTQRRLHRIKESWGLQDLVNDFGNLQLGPPMS

SEQ ID NO: 31 - protein, 199 aa, Homo sapiens
  REGION 1..199: note = MISC_FEATURE - hAPOBEC-3A polypeptide sequence
  REGION 70..106: note = MISC_FEATURE - Nucleic acid editing domain
MEASPASGPRHLMDPHIFTSNFNNGIGRHKTYLCYEVERLDNGTSVKMDQHRGFLHNQAKNLLCGFYGRHAELRFLDLVPSLQLDPAQIYRVTWFISWSPCFSWGCAGEVRAFLQENTHVRLRIFAARIYDYDPLYKEALQMLRDAGAQVSIMTYDEFKHCWDTFVDHQGCPFQPWDGLDEHSQALSGRLRAILQNQGN

SEQ ID NO: 32 - protein, 373 aa, Homo sapiens
  REGION 1..373: note = MISC_FEATURE - hAPOBEC-3F polypeptide sequence
  REGION 65..99: note = MISC_FEATURE - Nucleic acid editing domain
  REGION 248..283: note = MISC_FEATURE - Nucleic acid editing domain
MKPHFRNTVERMYRDTFSYNFYNRPILSRRNTVWLCYEVKTKGPSRPRLDAKIFRGQVYSQPEHHAEMCFLSWFCGNQLPAYKCFQITWFVSWTPCPDCVAKLAEFLAEHPNVTLTISAARLYYYWERDYRRALCRLSQAGARVKIMDDEEFAYCWENFVYSEGQPFMPWYKFDDNYAFLHRTLKEILRNPMEAMYPHIFYFHFKNLRKAYGRNESWLCFTMEVVKHHSPVSWKRGVFRNQVDPETHCHAERCFLSWFCDDILSPNTNYEVTWYTSWSPCPECAGEVAEFLARHSNVNLTIFTARLYYFWDTDYQEGLRSLSQEGASVEIMGYKDFKYCWENFVYNDDEPFKPWKGLKYNFLFLDSKLQEILE

SEQ ID NO: 33 - protein, 370 aa, Macaca mulatta
  REGION 1..370: note = MISC_FEATURE - Rhesus macaque APOBEC-3G polypeptide sequence
  REGION 1..61: note = MISC_FEATURE - Cytoplasmic localization signal
MVEPMDPRTFVSNFNNRPILSGLNTVWLCCEVKTKDPSGPPLDAKIFQGKVYSKAKYHPEMRFLRWFHKWRQLHHDQEYKVTWYVSWSPCTRCANSVATFLAKDPKVTLTIFVARLYYFWKPDYQQALRILCQKRGGPHATMKIMNYNEFQDCWNKFVDGRGKPFKPRNNLPKHYTLLQATLGELLRHLMDPGTFTSNFNNKPWVSGQHETYLCYKVERLHNDTWVPLNQHRGFLRNQAPNIHGFPKGRHAELCFLDLIPFWKLDGQQYRVTCFTSWSPCFSCAQEMAKFISNNEHVSLCIFAARIYDDQGRYQEGLRALHRDGAKIAMMNYSEFEYCWDTFVDRQGRPFQPWDGLDEHSQALSGRLRAI

SEQ ID NO: 34 - protein, 384 aa, Pan troglodytes
  REGION 1..384: note = MISC_FEATURE - Chimpanzee APOBEC-3G polypeptide sequence
  REGION 1..60: note = MISC_FEATURE - Cytoplasmic localization signal
  REGION 65..100: note = MISC_FEATURE - Nucleic acid editing domain
  REGION 257..291: note = MISC_FEATURE - Nucleic acid editing domain
MKPHFRNPVERMYQDTFSDNFYNRPILSHRNTVWLCYEVKTKGPSRPPLDAKIFRGQVYSKLKYHPEMRFFHWFSKWRKLHRDQEYEVTWYISWSPCTKCTRDVATFLAEDPKVTLTIFVARLYYFWDPDYQEALRSLCQKRDGPRATMKIMNYDEFQHCWSKFVYSQRELFEPWNNLPKYYILLHIMLGEILRHSMDPPTFTSNFNNELWVRGRHETYLCYEVERLHNDTWVLLNQRRGFLCNQAPHKHGFLEGRHAELCFLDVIPFWKLDLHQDYRVTCFTSWSPCFSCAQEMAKFISNNKHVSLCIFAARIYDDQGRCQEGLRTLAKAGAKISIMTYSEFKHCWDTFVDHQGCPFQPWDGLEEHSQALSGRLRAILQNQGN

SEQ ID NO: 35 - protein, 377 aa, Chlorocebus sabaeus
  REGION 1..377: note = MISC_FEATURE - Green monkey APOBEC-3G polypeptide sequence
  REGION 1..60: note = MISC_FEATURE - Cytoplasmic localization signal
  REGION 65..100: note = MISC_FEATURE - Nucleic acid editing domain
  REGION 257..290: note = MISC_FEATURE - Nucleic acid editing domain
MNPQIRNMVEQMEPDIFVYYFNNRPILSGRNTVWLCYEVKTKDPSGPPLDANIFQGKLYPEAKDHPEMKFLHWFRKWRQLHRDQEYEVTWYVSWSPCTRCANSVATFLAEDPKVTLTIFVARLYYFWKPDYQQALRILCQERGGPHATMKIMNYNEFQHCWNEFVDGQGKPFKPRKNLPKHYTLLHATLGELLRHVMDPGTFTSNFNNKPWVSGQRETYLCYKVERSHNDTWVLLNQHRGFLRNQAPDRHGFPKGRHAELCFLDLIPFWKLDDQQYRVTCFTSWSPCFSCAQKMAKFISNNKHVSLCIFAARIYDDQGRCQEGLRTLHRDGAKIAVMNYSEFEYCWDTFVDRQGRPFQPWDGLDEHSQALSGRLRAI

SEQ ID NO: 36 - protein, 384 aa, Homo sapiens
  REGION 1..384: note = MISC_FEATURE - Human APOBEC-3G polypeptide sequence
  REGION 1..60: note = MISC_FEATURE - Cytoplasmic localization signal
  REGION 65..100: note = MISC_FEATURE - Nucleic acid editing domain
  REGION 257..291: note = MISC_FEATURE - Nucleic acid editing domain
MKPHFRNTVERMYRDTFSYNFYNRPILSRRNTVWLCYEVKTKGPSRPPLDAKIFRGQVYSELKYHPEMRFFHWFSKWRKLHRDQEYEVTWYISWSPCTKCTRDMATFLAEDPKVTLTIFVARLYYFWDPDYQEALRSLCQKRDGPRATMKIMNYDEFQHCWSKFVYSQRELFEPWNNLPKYYILLHIMLGEILRHSMDPPTFTFNFNNEPWVRGRHETYLCYEVERMHNDTWVLLNQRRGFLCNQAPHKHGFLEGRHAELCFLDVIPFWKLDLDQDYRVTCFTSWSPCFSCAQEMAKFISKNKHVSLCIFTARIYDDQGRCQEGLRTLAEAGAKISIMTYSEFKHCWDTFVDHQGCPFQPWDGLDEHSQDLSGRLRAILQNQEN

SEQ ID NO: 37 - protein, 382 aa, Homo sapiens
  REGION 1..382: note = MISC_FEATURE - Human APOBEC-3B polypeptide sequence
  REGION 66..100: note = MISC_FEATURE - Nucleic acid editing domain
  REGION 251..289: note = MISC_FEATURE - Nucleic acid editing domain
MNPQIRNPMERMYRDTFYDNFENEPILYGRSYTWLCYEVKIKRGRSNLLWDTGVFRGQVYFKPQYHAEMCFLSWFCGNQLPAYKCFQITWFVSWTPCPDCVAKLAEFLSEHPNVTLTISAARLYYYWERDYRRALCRLSQAGARVTIMDYEEFAYCWENFVYNEGQQFMPWYKFDENYAFLHRTLKEILRYLMDPDTFTFNFNNDPLVLRRRQTYLCYEVERLDNGTWVLMDQHMGFLCNEAKNLLCGFYGRHAELRFLDLVPSLQLDPAQIYRVTWFISWSPCFSWGCAGEVRAFLQENTHVRLRIFAARIYDYDPLYKEALQMLRDAGAQVSIMTYDEFEYCWDTFVYRQGCPFQPWDGLEEHSQALSGRLRAILQNQGN

SEQ ID NO: 38 - protein, 395 aa, Rattus sp.
  REGION 1..395: note = MISC_FEATURE - Rat APOBEC-3B polypeptide sequence
MQPQGLGPNAGMGPVCLGCSHRRPYSPIRNPLKKLYQQTFYFHFKNVRYAWGRKNNFLCYEVNGMDCALPVPLRQGVFRKQGHIHAELCFIYWFHDKVLRVLSPMEEFKVTWYMSWSPCSKCAEQVARFLAAHRNLSLAIFSSRLYYYLRNPNYQQKLCRLIQEGVHVAAMDLPEFKKCWNKFVDNDGQPFRPWMRLRINFSFYDCKLQEIFSRMNLLREDVFYLQFNNSHRVKPVQNRYYRRKSYLCYQLERANGQEPLKGYLLYKKGEQHVEILFLEKMRSMELSQVRITCYLTWSPCPNCARQLAAFKKDHPDLILRIYTSRLYFWRKKFQKGLCTLWRSGIHVDVMDLPQFADCWTNFVNPQRPFRPWNELEKNSWRIQRRLRRIKESWGL

SEQ ID NO: 39 - protein, 226 aa, Bos taurus
  REGION 1..226: note = MISC_FEATURE - Bovine APOBEC-3B polypeptide sequence
DGWEVAFRSGTVLKAGVLGVSMTEGWAGSGHPGQGACVWTPGTRNTMNLLREVLFKQQFGNQPRVPAPYYRRKTYLCYQLKQRNDLTLDRGCFRNKKQRHAERFIDKINSLDLNPSQSYKIICYITWSPCPNCANELVNFITRNNHLKLEIFASRLYFHWIKSFKMGLQDLQNAGISVAVMTHTEFEDCWEQFVDNQSRPFQPWDKLEQYSASIRRRLQRILTAPI

SEQ ID NO: 40 - protein, 490 aa, Pan troglodytes
  REGION 1..490: note = MISC_FEATURE - Chimpanzee APOBEC-3B polypeptide sequence
MNPQIRNPMEWMYQRTFYYNFENEPILYGRSYTWLCYEVKIRRGHSNLLWDTGVFRGQMYSQPEHHAEMCFLSWFCGNQLSAYKCFQITWFVSWTPCPDCVAKLAKFLAEHPNVTLTISAARLYYYWERDYRRALCRLSQAGARVKIMDDEEFAYCWENFVYNEGQPFMPWYKFDDNYAFLHRTLKEIIRHLMDPDTFTFNFNNDPLVLRRHQTYLCYEVERLDNGTWVLMDQHMGFLCNEAKNLLCGFYGRHAELRFLDLVPSLQLDPAQIYRVTWFISWSPCFSWGCAGQVRAFLQENTHVRLRIFAARIYDYDPLYKEALQMLRDAGAQVSIMTYDEFEYCWDTFVYRQGCPFQPWDGLEEHSQALSGRLRAILQVRASSLCMVPHRPPPPPQSPGPCLPLCSEPPLGSLLPTGRPAPSLPFLLTASFSFPPPASLPPLPSLSLSPGHLPVPSFHSLTSCSIQPPCSSRIRETEGWASVSKEGRDLG

SEQ ID NO: 41 - protein, 190 aa, Homo sapiens
  REGION 1..190: note = MISC_FEATURE - Human APOBEC-3C polypeptide sequence
  REGION 65..100: note = MISC_FEATURE - Nucleic acid editing domain
MNPQIRNPMKAMYPGTFYFQFKNLWEANDRNETWLCFTVEGIKRRSVVSWKTGVFRNQVDSETHCHAERCFLSWFCDDILSPNTKYQVTWYTSWSPCPDCAGEVAEFLARHSNVNLTIFTARLYYFQYPCYQEGLRSLSQEGVAVEIMDYEDFKYCWENFVYNDNEPFKPWKGLKTNFRLLKRRLRESLQ

SEQ ID NO: 42 - protein, 190 aa, Gorilla sp.
  REGION 1..190: note = MISC_FEATURE - Gorilla APOBEC-3C polypeptide sequence
  REGION 65..100: note = MISC_FEATURE - Nucleic acid editing domain
MNPQIRNPMKAMYPGTFYFQFKNLWEANDRNETWLCFTVEGIKRRSVVSWKTGVFRNQVDSETHCHAERCFLSWECDDILSPNTNYQVTWYTSWSPCPECAGEVAEFLARHSNVNLTIFTARLYYFQDTDYQEGLRSLSQEGVAVKIMDYKDFKYCWENFVYNDDEPFKPWKGLKYNFRFLKRRLQEILE

SEQ ID NO: 43 - protein, 202 aa, Macaca mulatta
  REGION 1..202: note = MISC_FEATURE - Rhesus macaque APOBEC-3A polypeptide sequence
  REGION 72..103: note = MISC_FEATURE - Nucleic acid editing domain
MDGSPASRPRHLMDPNTFTFNFNNDLSVRGRHQTYLCYEVERLDNGTWVPMDERRGFLCNKAKNVPCGDYGCHVELRFLCEVPSWQLDPAQTYRVTWFISWSPCFRRGCAGQVRVFLQENKHVRLRIFAARIYDYDPLYQEALRTLRDAGAQVSIMTYEEFKHCWDTFVDRQGRPFQPWDGLDEHSQALSGRLRAILQNQGN

SEQ ID NO: 44 - protein, 185 aa, Bos taurus
  REGION 1..185: note = MISC_FEATURE - Bovine APOBEC-3A polypeptide sequence
  REGION 56..86: note = MISC_FEATURE - Nucleic acid editing domain
MDEYTFTENFNNQGWPSKTYLCYEMERLDGDATIPLDEYKGFVRNKGLDQPEKPCHAELYFLGKIHSWNLDRNQHYRLTCFISWSPCYDCAQKLTTFLKENHHISLHILASRIYTHNRFGCHQSGLCELQAAGARITIMTFEDFKHCWETFVDHKGKPFQPWEGLNVKSQALCTELQAILKTQQN

SEQ ID NO: 45 - protein, 200 aa, Homo sapiens
  REGION 1..200: note = MISC_FEATURE - Human APOBEC-3H polypeptide sequence
  REGION 54..88: note = MISC_FEATURE - Nucleic acid editing domain
MALLTAETFRLQFNNKRRLRRPYYPRKALLCYQLTPQNGSTPTRGYFENKKKCHAEICFINEIKSMGLDETQCYQVTCYLTWSPCSSCAWELVDFIKAHDHLNLGIFASRLYYHWCKPQQKGLRLLCGSQVPVEVMGFPKFADCWENFVDHEKPLSFNPYKMLEELDKNSRAIKRRLERIKIPGVRAQGRYMDILCDAEV

SEQ ID NO: 46 - protein, 210 aa, Macaca mulatta
  REGION 1..210: note = MISC_FEATURE - Rhesus macaque APOBEC-3H polypeptide sequence
MALLTAKTFSLQFNNKRRVNKPYYPRKALLCYQLTPQNGSTPTRGHLKNKKKDHAEIRFINKIKSMGLDETQCYQVTCYLTWSPCPSCAGELVDFIKAHRHLNLRIFASRLYYHWRPNYQEGLLLLCGSQVPVEVMGLPEFTDCWENFVDHKEPPSFNPSEKLEELDKNSQAIKRRLERIKSRSVDVLENGLRSLQLGPVTPSSSIRNSR

SEQ ID NO: 47 - protein, 386 aa, Homo sapiens
  REGION 1..386: note = MISC_FEATURE - Human APOBEC-3D polypeptide sequence
  REGION 78..109: note = MISC_FEATURE - Nucleic acid editing domain
  REGION 262..296: note = MISC_FEATURE - Nucleic acid editing domain
MNPQIRNPMERMYRDTFYDNFENEPILYGRSYTWLCYEVKIKRGRSNLLWDTGVFRGPVLPKRQSNHRQEVYFRFENHAEMCFLSWFCGNRLPANRRFQITWFVSWNPCLPCVVKVTKFLAEHPNVTLTISAARLYYYRDRDWRWVLLRLHKAGARVKIMDYEDFAYCWENFVCNEGQPFMPWYKFDDNYASLHRTLKEILRNPMEAMYPHIFYFHFKNLLKACGRNESWLCFTMEVTKHHSAVFRKRGVFRNQVDPETHCHAERCFLSWFCDDILSPNTNYEVTWYTSWSPCPECAGEVAEFLARHSNVNLTIFTARLCYFWDTDYQEGLCSLSQEGASVKIMGYKDFVSCWKNFVYSDDEPFKPWKGLQTNFRLLKRRLREILQ

SEQ ID NO: 48 - protein, 236 aa, Homo sapiens
  REGION 1..236: note = MISC_FEATURE - Human APOBEC-1 polypeptide sequence
MTSEKGPSTGDPTLRRRIEPWEFDVFYDPRELRKEACLLYEIKWGMSRKIWRSSGKNTTNHVEVNFIKKFTSERDFHPSMSCSITWFLSWSPCWECSQAIREFLSRHPGVTLVIYVARLFWHMDQQNRQGLRDLVNSGVTIQIMRASEYYHCWRNFVNYPPGDEAHWPQYPPLWMMLYALELHCIILSLPPCLKISRRWQNHLTFFRLHLQNCHYQTIPPHILLATGLIHPSVAWR

SEQ ID NO: 49 - protein, 229 aa, Mus musculus
  REGION 1..229: note = MISC_FEATURE - Mouse APOBEC-1 polypeptide sequence
MSSETGPVAVDPTLRRRIEPHEFEVFFDPRELRKETCLLYEINWGGRHSVWRHTSQNTSNHVEVNFLEKFTTERYFRPNTRCSITWFLSWSPCGECSRAITEFLSRHPYVTLFIYIARLYHHTDQRNRQGLRDLISSGVTIQIMTEQEYCYCWRNFVNYPPSNEAYWPRYPHLWVKLYVLELYCIILGLPPCLKILRRKQPQLTFFTITLQTCHYQRIPPHLLWATGLK

SEQ ID NO: 50 - protein, 224 aa, Homo sapiens
  REGION 1..224: note = MISC_FEATURE - Human APOBEC-2 polypeptide sequence
MAQKEEAAVATEAASQNGEDLENLDDPEKLKELIELPPFEIVTGERLPANFFKFQFRNVEYSSGRNKTFLCYVVEAQGKGGQVQASRGYLEDEHAAAHAEEAFFNTILPAFDPALRYNVTWYVSSSPCAACADRIIKTLSKTKNLRLLILVGRLFMWEEPEIQAALKKLKEAGCKLRIMKPQDFEYVWQNFVEQEEGESKAFQPWEDIQENFLYYEEKLADILK

SEQ ID NO: 51 - protein, 224 aa, Mus musculus
  REGION 1..224: note = MISC_FEATURE - Mouse APOBEC-2 polypeptide sequence
MAQKEEAAEAAAPASQNGDDLENLEDPEKLKELIDLPPFEIVTGVRLPVNFFKFQFRNVEYSSGRNKTFLCYVVEVQSKGGQAQATQGYLEDEHAGAHAEEAFFNTILPAFDPALKYNVTWYVSSSPCAACADRILKTLSKTKNLRLLILVSRLFMWEEPEVQAALKKLKEAGCKLRIMKPQDFEYIWQNFVEQEEGESKAFEPWEDIQENFLYYEEKLADILK

SEQ ID NO: 52 - protein, 224 aa, Rattus sp.
  REGION 1..224: note = MISC_FEATURE - Rat APOBEC-2 polypeptide sequence
MAQKEEAAEAAAPASQNGDDLENLEDPEKLKELIDLPPFEIVTGVRLPVNFFKFQFRNVEYSSGRNKTFLCYVVEAQSKGGQVQATQGYLEDEHAGAHAEEAFFNTILPAFDPALKYNVTWYVSSSPCAACADRILKTLSKTKNLRLLILVSRLFMWEEPEVQAALKKLKEAGCKLRIMKPQDFEYLWQNFVEQEEGESKAFEPWEDIQENFLYYEEKLADILK

SEQ ID NO: 53 - protein, 208 aa, Petromyzon marinus
  REGION 1..208: note = MISC_FEATURE - Petromyzon marinus CDA1 (pmCDAl) polypeptide sequence
MTDAEYVRIHEKLDIYTFKKQFFNNKKSVSHRCYVLFELKRRGERRACFWGYAVNKPQSGTERGIHAEIFSIRKVEEYLRDNPGQFTINWYSSWSPCADCAEKILEWYNQELRGNGHTLKIWACKLYYEKNARNQIGLWNLRDNGVGLNVMVSEHYQCCRKIFIQSSHNQLNENRWLEKTLKRAEKRRSELSFMIQVKILHTTKSPAV

SEQ ID NO: 54 - protein, 381 aa, Homo sapiens
  REGION 1..381: note = MISC_FEATURE - Human APOBEC3G D316R D317R polypeptide sequence
MKPHFRNTVERMYRDTFSYNFYNRPILSRRNTVWLCYEVKTKGPSRPPLDAKIFRGQVYSELKYHPEMRFFHWFSKWRKLHRDQEYEVTWYISWSPCTKCTRDMATFLAEDPKVTLTIFVARLYYFWDPDYQEALRSLCQKRDGPRATMKFNYDEFQHCWSKFVYSQRELFEPWNNLPKYYILLHFMLGEILRHSMDPPTFTFNFNNEPWVRGRHETYLCYEVERMHNDTWVLLNQRRGFLCNQAPHKHGFLEGRHAELCFLDVIPFWKLDLDQDYRVTCFTSWSPCFSCAQEMAKFISKKHVSLCIFTARIYRRQGRCQEGLRTLAEAGAKISFTYSEFKHCWDTFVDHQGCPFQPWDGLDEHSQDLSGRLRAILQNQEN

SEQ ID NO: 55 - protein, 182 aa, Homo sapiens
  REGION 1..182: note = MISC_FEATURE - Human APOBEC3G chain A polypeptide sequence
MDPPTFTFNFNNEPWWGRHETYLCYEVERMHNDTWVLLNQRRGFLCNQAPHKHGFLEGRHAELCFLDVIPFWKLDLDQDYRVTCFTSWSPCFSCAQEMAKFISKNKHVSLCIFTARIYDDQGRCQEGLRTLAEAGAKISFTYSEFKHCWDTFVDHQGCPFQPWDGLDEHSQDLSGRLRAILQ

SEQ ID NO: 56 - protein, 184 aa, Homo sapiens
  REGION 1..184: note = MISC_FEATURE - Human APOBEC3G chain A D120R D121R polypeptide sequence
MDPPTFTFNFNNEPWVRGRHETYLCYEVERMHNDTWVLLNQRRGFLCNQAPHKHGFLEGRHAELCFLDVIPFWKLDLDQDYRVTCFTSWSPCFSCAQEMAKFISKNKHVSLCIFTARIYRRQGRCQEGLRTLAEAGAKISFMTYSEFKHCWDTFVDHQGCPFQPWDGLDEHSQDLSGRLRAILQ

SEQ ID NO: 57 - protein, 367 aa, Homo sapiens
  REGION 1..367: note = MISC_FEATURE - hAPOBEC-4 polypeptide sequence
MEPIYEEYLANHGTIVKPYYWLSFSLDCSNCPYHIRTGEEARVSLTEFCQIFGFPYGTTFPQTKHLTFYELKTSSGSLVQKGHASSCTGNYIHPESMLFEMNGYLDSAIYNNDSIRHIILYSNNSPCNEANHCCISKMYNFLITYPGITLSIYFSQLYHTEMDFPASAWNREALRSLASLWPRVVLSPISGGIWHSVLHSFISGVSGSHVFQPILTGRALADRHNAYEINAITGVKPYFTDVLLQTKRNPNTKAQEALESYPLNNAFPGQFFQMPSGQLQPNLPPDLRAPVVFVLVPLRDLPPMHMGQNPNKPRNIVRHLNMPQMSFQETKDLGRLPTGRSVEIVEITEQFASSKEADEKKKKKGKK

SEQ ID NO: 58 - protein, 388 aa, Rattus norvegicus
  REGION 1..388: note = MISC_FEATURE - rAPOBEC-4 polypeptide sequence
MEPLYEEYLTHSGTIVKPYYWLSVSLNCTNCPYHIRTGEEARVPYTEFHQTFGFPWSTYPQTKHLTFYELRSSSGNLIQKGLASNCTGSHTHPESMLFERDGYLDSLIFHDSNIRHIILYSNNSPCDEANHCCISKMYNFLMNYPEVTLSVFFSQLYHTENQFPTSAWNREALRGLASLWPQVTLSAISGGIWQSILETFVSGISEGLTAVRPFTAGRTLTDRYNAYEINCITEVKPYFTDALHSWQKENQDQKVWAASENQPLHNTTPAQWQPDMSQDCRTPAVFMLVPYRDLPPIHVNPSPQKPRTVVRHLNTLQLSASKVKALRKSPSGRPVKKEEARKGSTRSQEANETNKSKWKKQTLFIKSNICHLLEREQKKIGILSSWSV

SEQ ID NO: 59 - protein, 363 aa, Macaca fascicularis
  REGION 1..363: note = MISC_FEATURE - mfAPOBEC-4 polypeptide sequence
MEPTYEEYLANHGTIVKPYYWLSFSLDCSNCPYHIRTGEEARVSLTEFCQIFGFPYGTTYPQTKHLTFYELKTSSGSLVQKGHASSCTGNYIHPESMLFEMNGYLDSAIYNNDSIRHIILYCNNSPCNEANHCCISKVYNFLITYPGITLSIYFSQLYHTEMDFPASAWNREALRSLASLWPRVVLSPISGGIWHSVLHSFVSGVSGSHVFQPILTGRALTDRYNAYEINAITGVKPFFTDVLLHTKRNPNTKAQMALESYPLNNAFPGQSFQMTSGIPPDLRAPVVFVLLPLRDLPPMHMGQDPNKPRNIIRHLNMPQMSFQETKDLERLPTRRSVETVEITERFASSKQAEEKTKKKKGKK

SEQ ID NO: 60 - protein, 218 aa, Rattus norvegicus
  REGION 1..218: note = MISC_FEATURE - rAPOBEC-1 (delta 177-186) polypeptide sequence
MSSETGPVAVDPTLRRRIEPHEFEVFFDPRELRKETCLLYEINWGGRHSIWRHTSQNTNKHVEVNFIEKFTTERYFCPNTRCSITWFLSWSPCGECSRAITEFLSRYPHVTLFIYIARLYHHADPRNRQGLRDLISSGVTIQIMTEQESGYCWRNFVNYSPSNEAHWPRYPHLWVRGLPPCLNILRRKQPQLTFFTIALQSCHYQRLPPHILWATGLK

SEQ ID NO: 61 - protein, 218 aa, Rattus norvegicus
  REGION 1..218: note = MISC_FEATURE - rAPOBEC-1 (delta 202-213) polypeptide sequence
MSSETGPVAVDPTLRRRIEPHEFEVFFDPRELRKETCLLYEINWGGRHSIWRHTSQNTNKHVEVNFIEKFTTERYFCPNTRCSITWFLSWSPCGECSRAITEFLSRYPHVTLFIYIARLYHHADPRNRQGLRDLISSGVTIQIMTEQESGYCWRNFVNYSPSNEAHWPRYPHLWVRLYVLELYCIILGLPPCLNILRRKQPQHYQRLPPHILWATGLK

SEQ ID NO: 62 - protein, 198 aa, Mus musculus
  REGION 1..198: note = MISC_FEATURE - mouse cytidine deaminase polypeptide sequence
  REGION 1..30: note = MISC_FEATURE - Nuclear localization sequence
  REGION 183..198: note = MISC_FEATURE - Nuclear export signal
MDSLLMKQKKFLYHFKNVRWAKGRHETYLCYVVKRRDSATSCSLDFGHLRNKSGCHVELLFLRYISDWDLDPGRCYRVTWFTSWSPCYDCARHVAEFLRWNPNLSLRIFTARLYFCEDRKAEPEGLRRLHRAGVQIGIMTFKDYFYCWNTFVENRERTFKAWEGLHENSVRLTRQLRRILLPLYEVDDLRDAFRMLGF

SEQ ID NO: 63 - protein, 224 aa, Petromyzon marinus
  REGION 1..224: note = MISC_FEATURE - pmCDA-1 polypeptide sequence
MAGYECVRVSEKLDFDTFEFQFENLHYATERHRTYVIFDVKPQSAGGRSRRLWGYIINNPNVCHAELILMSMIDRHLESNPGVYAMTWYMSWSPCANCSSKLNPWLKNLLEEQGHTLTMHFSRIYDRDREGDHRGLRGLKHVSNSFRMGVVGRAEVKECLAEYVEASRRTLTWLDTTESMAAKMRRKLFCILVRCAGMRESGIPLHLFTLQTPLLSGRVVWWRV

SEQ ID NO: 64 - protein, 331 aa, Petromyzon marinus
  REGION 1..331: note = MISC_FEATURE - pmCDA-2 polypeptide sequence
MELREVVDCALASCVRHEPLSRVAFLRCFAAPSQKPRGTVILFYVEGAGRGVTGGHAVNYNKQGTSIHAEVLLLSAVRAALLRRRRCEDGEEATRGCTLHCYSTYSPCRDCVEYIQEFGASTGVRVVIHCCRLYELDVNRRRSEAEGVLRSLSRLGRDFRLMGPRDAIALLLGGRLANTADGESGASGNAWVTETNVVEPLVDMTGFGDEDLHAQVQRNKQIREAYANYASAVSLMLGELHVDPDKFPFLAEFLAQTSVEPSGTPRETRGRPRGASSRGPEIGRQRPADFERALGAYGLFLHPRIVSREADREEIKRDLIVVMRKHNYQGP

SEQ ID NO: 65 - protein, 209 aa, Petromyzon marinus
  REGION 1..209: note = MISC_FEATURE - pmCDA-5 polypeptide sequence
MAGDENVRVSEKLDFDTFEFQFENLHYATERHRTYVIFDVKPQSAGGRSRRLWGYIINNPNVCHAELILMSMIDRHLESNPGVYAMTWYMSWSPCANCSSKLNPWLKNLLEEQGHTLMMHFSRIYDRDREGDHRGLRGLKHVSNSFRMGVVGRAEVKECLAEYVEASRRTLTWLDTTESMAAKMRRKLFCILVRCAGMRESGMPLHLFT

SEQ ID NO: 66 - protein, 158 aa, Saccharomyces cerevisiae
  REGION 1..158: note = MISC_FEATURE - yCD polypeptide sequence
MVTGGMASKWDQKGMDIAYEEAALGYKEGGVPIGGCLINNKDGSVLGRGHNMRFQKGSATLHGEISTLENCGRLEGKVYKDTTLYTTLSPCDMCTGAIIMYGIPRCVVGENVNFKSKGEKYLQTRGHEVVVVDDERCKKIMKQFIDERPQDWFEDIGE

SEQ ID NO: 67 - protein, 194 aa, synthetic construct
  REGION 1..194: note = cytidine deaminase polypeptide sequence
MKPQIRDHRPNPMEAMYPHIFYFHFENLEKAYGRNETWLCFTVEIIKQYLPVPWKKGVFRNQVDPETHCHAEKCFLSWFCNNTLSPKKNYQVTWYTSWSPCPECAGEVAEFLAEHSNVKLTIYTARLYYFWDTDYQEGLRSLSEEGASVEIMDYEDFQYCWENFVYDDGEPFKRWKGLKYNFQSLTRRLREILQ

SEQ ID NO: 68 - protein, 192 aa, synthetic construct
  REGION 1..192: note = cytidine deaminase polypeptide sequence
MADSSEKMRGQYISRDTFEKNYKPIDGTKEAHLLCEIKWGKYGKPWLHWCQNQRMNIHAEDYFMNNIFKAKKHPVHCYVTWYLSWSPCADCASKIVKFLEERPYLKLTIYVAQLYYHTEEENRKGLRLLRSKKVIIRVMDISDYNYCWKVFVSNQNGNEDYWPLQFDPWVKENYSRLLDIFWESKCRSPNPW

SEQ ID NO: 69 - protein, 280 aa, synthetic construct
  REGION 1..280: note = cytidine deaminase polypeptide sequence
MDPQRLRQWPGPGPASRGGYGQRPRIRNPEEWFHELSPRTFSFHFRNLRFASGRNRSYICCQVEGKNCFFQGIFQNQVPPDPPCHAELCFLSWFQSWGLSPDEHYYVTWFISWSPCCECAAKVAQFLEENRNVSLSLSAARLYYFWKSESREGLRRLSDLGAQVGIMSFQDFQHCWNNFVHNLGMPFQPWKKLHKNYQRLVTELKQILREEPATYGSPQAQGKVRIGSTAAGLRHSHSHTRSEAHLRPNHSSRQHRILNPPREARARTCVLVDASWICYR

SEQ ID NO: 70 - protein, 555 aa, synthetic construct
  REGION 1..555: note = pYY-BEM3.1; tr|F7B644|F7B644_HORSE polypeptide sequence
MPRGRARERQRRNPMEKLDAEAFSFHFLNMEFVYDRNCSYLCYQVEGRLSGSPVLSEQGVFPNEVCGKTRRHAELCFLDWFRGRLSPDEYYCVTWFISWSPCSNCAREVAEFLKRHRNVELSIFAARLYYCRDHEQGLQSLCNRGAQLAVMLRKDFTYCWDNFVHNSGREFSPWENIDANSDLLARKLEDLLKNPMEKLHRKTFSFHFRNLKFAKGRKCSYLCYRVEGRLSGSPGLSEQGVFLNEVCDENCRHAELCFLHWFRGRLSPHADYRVTWFISWSPCSNCAREVAEFLKQHRNVELHISAARLYYWQRNKPGLRNLRSSGAQLAIMFFWDFRDCWDNFVHNSGRHFIPWKKINVNSRLLATKLEDLLKNPLEKLHPNTFSFHFCNLEFAYDRKYSYLCYQVEGRLSGSPGLSEQGVFLNEVCGKTRCHAELCFLDWFRVRLSPDEYYRVTWFISWSPCFYCAREVADFLKQYRNVKLSIFAARLYYCRDHAQGLRSLCSSGAQLAIMFFWDFRYCWDNFVHNSGREFRPWKKINVNSRLLATKLEDILK

SEQ ID NO: 71 - protein, 437 aa, synthetic construct
  REGION 1..437: note = pYY-BEM3.2; tr|D1LZA1|D1LZA1_PANTI polypeptide sequence
MEPWRPSPRNPMDRIDPKTFRFQFPNLRYASGRKLCYLCFQVERDYFYYNDSDWGVFRNEVHPWAPCHAEQCFLSWFRDQYPYRDEDYNVTWFLSWSPCPTCAEEVVEFLEEYRNLTLSIFTSRLYYFWHPNYQEGLCKLWDAGVQLDIMSCDEFEYCWDNFVYHKGMRFQRRNLLKDYDFLAAKLQEILSPGQQRKRDWPFPPRPGAQVDPRSWVQEVTEPGINTRRHPLHLLVSFLLPRPTMNPLQEDIFYRQFGNQHRVPKPYYYRRKTYLCYQLKLPEGTLIDKDCLRNKKKRHAEICFIDKIKSLTRDTSQRFEIICYITWSPCPFCAEELVAFVKDNPHLSLRIFASRLYVHWRWKYQQGLRHLHASGIPVAVMSLPEFEDCWRNFVDHQDRLFQPWRNLDQYSESIKRRLGKILTPLNDLRNDFRNLKLE

SEQ ID NO: 72 - protein, 440 aa, synthetic construct
  REGION 1..440: note = pYY-BEM3.3; tr|A0A3Q0DM17|A0A3Q0DM17_TARSY polypeptide sequence
MPMKRMYSNIYFDHFNNQRLLSGQNAPWLCFKVERVENCMLVPLETGVFGNQVSGCCGKTERPVEPTSLTRSVLVSPNPGTELRAQQPSRKGHLGKLGCVEYPSPGLALVMLGYGASTYCPDSSMYCPETCHHPEMCFLYWFEKTLSHEEQYQITWYVSWSPCVNCAEEVAEFLSVHPKVNLTIYAARLYCYQKLNHRQGLRRLCKEGACVKIMNYEEFDHCWENFVYNNYKSFKPWVKLQDNYELLATELDKILRIPMERMPQKKFRFHFQNLIAKDRNTTWLCFEVKNVRKKHPPDLLERGIFQNQVTPRINCHAEMCFLSWFLENMLLHGKRYQVTWYISWSPCSICAEEVAEFLSAHPKVSLTIYAARLYYFWVPGYRQGLRRLVEEGARVEIMNYEEFDYCWENFVSINNEPFQPWEGLHEKYGYLVTKLNNILG

SEQ ID NO: 73 - protein, 453 aa, synthetic construct
  REGION 1..453: note = pYY-BEM3.4; tr|A0A3Q0DNJ5|A0A3Q0DNJ5_TARSY polypeptide sequence
MEDNPEPRPRQQMDQDTFIFNFNNDPSVRGRHQTFLCYEVEHLDDDTWVPQDKYLGFLHNQPQSRSNAYCAYHAELCFLELVSSWQLDPAQRYRVTCFISWSPCSSCAQEVAAFLKKNRHVTLRILAARIYDYYQGYEDGLRTLQGVGVDITVMTSAEFGHCWNTFVDHQGSPFQPWEGLDQHSQVIWQRMQDILQVIPAKYLMEKVKYTVTVDILFKGRVPGPRYLMDQNTFTRNFINNLSVSGRRQTLLCYEVERLGGDIWVPLDQLRGFLLSQARDVLNYYQGRHAEPCFLDLVSSWQLDPAQHYRVTWFISWSPCTSCAQAVAAFLRENRHVTLRILAARIYDYHQGYEEGLRTLQRTGAHIDIMTFKEFGHCWNTFVNHKGSPFKSWTGLDQHSQALRKRLQDILHTMASSLWDQSEPKKPIPSQEVTLPESIPPSHGNRFRLVKRPS

SEQ ID NO: 74 - protein, 424 aa, synthetic construct
  REGION 1..424: note = pYY-BEM3.5; tr|G5AYU5|G5AYU5_HETGA polypeptide sequence
FCFLSCVHRKPIERIYKKAFRFYFRNLRCAYGRNKTFLCYEVKRERDNKVLHKGVVLNQVEPYMPLHAELRFLSWFHDTLLCPLGSYQVTLYVSWSPCSECAEELTTFLAGHRNVTMTIYVAQLYYCNWKSPNREGLKILIAEDARLRVMFYDEFLYCWRNFVKNDYNNFDPWSLLDENSRYHNRILQNILKGWGRPHRVGPEGEQTATPGGSGGHCISVFSLLRRREMTLKEETFRVQFNNAYKAPKPYRRRVTYLCYQLQEANGDPLTKGCLRTKKGYHAESRFIKRICSMDLGQDQSYQVTCFLTWSPCPHCAQELVSFKRAHPHLRLQIFTARLFFHWKRSYQEGLQRLCRAQVPVAVMGHPEFAYCWDNFVDHQPGPFEPPWAKLEYYSSCLKRRLQQILRSWGVDDLTNDFRNLQLGP

SEQ ID NO: 75 - protein, 385 aa, synthetic construct
  REGION 1..385: note = pYY-BEM3.6; tr|A0A2Y9QMV5|A0A2Y9QMV5_TRIMA polypeptide sequence
MLSSPQTPGTRKPMKTLAPDEFSFNFENLRLAHGRNTTFLCFQVETKAPPSLNSPDSGIFQNQDHCPSHHHAEMVFLTWFQKRLSPAQHYEVTWYMSWSPCSRCAVQVAKFLKSNSTVNLSIFVARLYYPRELETKDGLHSLWQAGAQVQIMFFQDFKYCWENFVNNEGKPFQPWKNLDENSKDWDTELKDIHRNTTDLLTEEMFYSQFYNREKKSSIPRKTYLCYQLNEPQPVKRCLHYKKGYHAVTRFIDGIVSMNLDPARSYDITCYFTWSPCNRYARKLVSFIEDYPNLRLKVYTSRLYFHWCWTNMQGLQHLQNSRVTVAVMTFRDFEYCWKNFVDNQGKPFEPWEKLDLYSQSTERRLRRILKPLTPDVLNEDFGNLHL

SEQ ID NO: 76 - protein, 381 aa, synthetic construct
  REGION 1..381: note = pYY-BEM3.7; tr|H0XHI0|H0XHI0_OTOGA polypeptide sequence
LSCAFRDPMNRMYPKTFCQNFEKEPCPSNQNSSWLCFEVETKNSAVFFHRGVFRNQPAPPPRAPTSVLLSQGPVKTPCHAEECFLTWIQGVLPPDHHYHVTWYVSRGPCANCANLIVHFLAMHRRVTLTIFAAHLNFFWESDFQQGLLRMDQEGVQLHIMGYEEFEYCWDNFVYNQRKQFVPWNGLNENYEFMVSTLEDILRSPLDRIRQKDFSIHFRNSLWLDDKSTWLCFEVKRTKSPVPLYRGVFRNQSPPKTPCHAEVRFFTWLQDLPPDFCCQFTWYLSWSPCADCADLVANFLAKHRNVSLTIFVARLYYYRDPEMHRGLRRMYQEGANVDIMSVIEFEYCWDNFVYNQGKQFVPWNGLNENYEFLVPRLQEILE

SEQ ID NO: 77 - protein, 337 aa, synthetic construct
  REGION 1..337: note = pYY-BEM3.8; tr|A0A3M0K4Y7|A0A3M0K4Y7_HIRRU polypeptide sequence
MYISKKALRRHFDPRVYPRETYLLCELQWEGSRRVWIHWIRNVPDHHAEEYFLEEVFEPRNYGFCNITLYLSWSPCCTCCSKIRDFLKRNPNVKIDIRVARLIYPDYAETRSSLRELNGLQRVSIQVMEAAGLSCIESKNHRISQVERDPKGSSSPTLFTLQDHLKLSNMTESVIQDSVSIQICYQMRILGFQCHIRWKLQPEDFQRNYSPNQIGRVVYLLYEVRWRRGSIWRNWCSNNPEQHAEVNFLENHFHHRPQTPCSITWFLSTSPCGKCSRRILEFLKSQPNVTLEIYAAKLFRHHDIRNRQGLRNLMMNGVTIYIMNLEGNPASLCLSVD

SEQ ID NO: 78 - protein, 237 aa, synthetic construct
  REGION 1..237: note = pYY-BEM3.9; tr|A0A3P4LUZ8|A0A3P4LUZ8_GULGU polypeptide sequence
MSFEDYEYCWETFVDHKGMYFQSWDLLRDNDLLAAELKNILRSTMNPLRQEIFYHQFGNQPRAPRPYHRRKTYLCYQLQPHEGPITARVCLQNKKKRHAEIRFIDNIRALRLDRSQTFEITCYLTWSPCPTCAKALAVFVQDHPHISLRLFASRLFIHWCWKYQEGLRLLHRSRIPVAVMRLQEFEDCWRNFVDNQDEPFQPWNKLEQYSESITRRLRRILGHPQNNLENDFRNLHI

SEQ ID NO: 79 - protein, 221 aa, synthetic construct
  REGION 1..221: note = pYY-BEM3.10; tr|G5BPM8|G5BPM8_HETGA polypeptide sequence
RRRIEPWQFEASFDPRQLRRETCLLSEVRWGTSPRAWRGCSLNTARHAEVSFMDRLTSEGRLRGPVRCSITWFLSWSPCGACAQAIGEFLRQHPNVSLVIYIARLFWHVDEQNRQGLRDLVTRGVRMQVMSDPEFAHCWRNFVNYSPGQEARWPQVPPVWTWLYSLELHCILLNLPPCLKISRRHHNQLTFFQLILQNCHYQAIPSPVLLASGLIHPFVTW

SEQ ID NO: 80 - protein, 211 aa, synthetic construct
  REGION 1..211: note = pYY-BEM3.11; tr|H2M862|H2M862_ORYLA polypeptide sequence
MITKLDSVLLPKKKFIYHYKNMRWARGRHETYLCFVVKRRVGPESLSFDFGHLRNRNGCHVELLFLRHLSALCPGLWGYGATGQGRVSYSITWFCSWSPCANCSFRLAQFLSQTPNLRLRIFVSRLYFCDLEDSREREGLRMLKKVGVHITVMSYKDYFYCWQTFVARKQSKFKPWDGLHQNSVRLSRKLNRILQPCETEDFRDAFKLLGL

SEQ ID NO: 81 - protein, 353 aa, synthetic construct
  REGION 1..353: note = pYY-BEM3.12; tr|H0Y0C6|H0Y0C6_OTOGA polypeptide sequence
MYLKTFYRHFNNRPYLSRRNDTWLCFEVKTTSSNSPGSFYSGVFRNQGPRYCPWHTELCFLTWVRPIVSHHHFYQITWYMSWSPCANCAWQVATFLATHENVSLTNYTVRIYYFWRQDYRQGLLRMIEEGTQVYVMSSKEFQHCWENFVDHWGTRWVTCWNRLKKNYEFLVTRLSEILSDPKERISPNTFYNQFNNTPVPRGRKDTWLCFEVKEKNSNSPGSFHRGVFQNQVFSGTSSHARRCPPDHHYEVTWYTSWSPCAHCAWHVVNFLTSNPNVSLTIFAARLYYIYRPEIQQGLRRVFQEGAKVHIMSLKEFKYCWAKLVYNSGMRFMPWYQFNFNFLFPNTTLKGDLH

SEQ ID NO: 82 - protein, 189 aa, synthetic construct
  REGION 1..189: note = pYY-BEM3.13; tr|A0A3Q2Z5X6|A0A3Q2Z5X6_HIPCM polypeptide sequence
MDVHFMNFIYHYKNMRWAKGRNETYLCFVVKRRVGPNSLTFDFGHLRNRNGCHVELLFLRYLGRRLSYSITWFCSWSPCANCSAALSQFLSRMPNLRLRIFVARLYFCDMEDSHEREGLRLLQKAGVQVTVMSYKDYYYCWQTFVDRKKSHFKAWEDLHQNSVRLSRKLNRILQPCEMDLRDAFKLLGL

SEQ ID NO: 83 - protein, 190 aa, synthetic construct
  REGION 1..190: note = pYY-BEM3.15; tr|A0A2K6NY90|A0A2K6NY90_RHIRO polypeptide sequence
MNPHIRNPMEAMYPGTFYFHFKNLWEADNRNESWLCFAVEVIKHHSTVSWKRGVFRNQVDPETHCHAEKCFLSWFCDNTLSPKKNYQVTWYTSWSPCPECAREVAKFLARHSNVMLTIYTARLYYSQYPNYQEGLRRLNEEGVPVEIMDYEDFKYCWENFVYNGDELFKPWKGLKYNFLFLDSKLQEILE

SEQ ID NO: 84 - protein, 202 aa, synthetic construct
  REGION 1..202: note = pYY-BEM3.16; tr|Q6ICH2|Q6ICH2_HUMAN polypeptide sequence
MNPQIRNPMERMYRDTFYDNFENEPILYGRSYTWLCYEVKIKRGRSNLLWDTGVFRGPVLPKRQSNHRQEVDPETHCHAERCFLSWFCDDILSPNTNYEVTWYTSWSPCPECAGEVAEFLARHSNVNLTIFTARLCYFWDTDYQEGLCSLSQEGASVKIMGYKDFVSCWKNFVYSDDEPFKPWKGLQTNFRLLKRRLREILQ

SEQ ID NO: 85 - protein, 202 aa, synthetic construct
  REGION 1..202: note = pYY-BEM3.17; tr|G8GPV1|G8GPV1_CERNE polypeptide sequence
MDGSPASRPGHVMDPGTFTSNFNNKPWVSGQRETYLCYKVERSHNDTWVLLNQHRGFLRNQAKNRLHGDYGCHAELCFLGEVPSWRLDPTQTYRVTWFISWSPCFSGGCAEQVRAFLQENTHVRLRIFAARIYDYDFLYQEALRTLRDAGAQVSIMTYEEFKHCWDTFVDHQGRPFQPWDGLDEHSQALSGRLQAILQNQGN

SEQ ID NO: 86 - protein, 181 aa, synthetic construct
  REGION 1..181: note = pYY-BEM3.18; tr|Q1WBT6|Q1WBT6_SYMSY polypeptide sequence
MALLTAKTFRLQFNNKRRVTKPYYPRKALLCYQLTPQNGSTPTRGYFKNKKKRHAEIRFINKIKSMGLDETQCYQVTCYLTWSPCPSCAWELVDFIKAHDHLNLGIFASRLYYHWCRHQQEGLRLLCGSQVPVEVMGFPEFADCWENFVDHEEPLSFNPSEMLEELDKNSRAIKRRLEKIK

SEQ ID NO: 87 - protein, 211 aa, synthetic construct
  REGION 1..211: note = pYY-BEM3.19; tr|A0A3B4CS14|A0A3B4CS14_PYGNA polypeptide sequence
MDNTNRRKFIYHYKNVRWARGRHETYLCFVVKKRNSPDSLSFDFGHLRNRNGCHVELLFLRYIEVLCPGLWGSGVDGVRVSYAVTWFCSWSPCSNCAQRLTNFLSQTPNLRLRIFVARLYFCDEEDSLEREGLRHLQRAGVQITVMTYKDFFYCWQTFVASRERCFKAWEGLRQNSVRLSRKLNRILQVFISTPVISPLITTHLGQSWAGG

SEQ ID NO: 88 - protein, 315 aa, synthetic construct
  REGION 1..315: note = pYY-BEM3.20; tr|A0A087XZI4|A0A087XZI4_POEFO polypeptide sequence
RKVSYSVTWFCSWSPCANCSIRLAQFLHQTPNLRLRIFVSRLYFCDLEDSREREGLRILKKAGVHITVMSYKDYFYCWQTFVAKSQSKFKPWDGLHQNYIRLSRKLNRILQPALDIKKFIYHYKNLRWARGRCETYLCFVVKKKLHLFMFVIVGRNRLFDLNVTMNNKSLYLIPLHLQLLFLRHLGALCPGLWGYGVTGERKVSYSVTWFCSWSPCANCSIRLAQFLHQTPNLRLRIFVSRLYFCDLEDSREREGLRILKKAGVHITVMSYKDYFYCWQTFVAKSQSKFKPWDGLHQNYIRLSRKLNRILQVQFF

SEQ ID NO: 89 - protein, 189 aa, synthetic construct
  REGION 1..189: note = pYY-BEM3.21; tr|A0A341AEK4|A0A341AEK4_9CETA polypeptide sequence
MASDRGPSAGDATSRRRIEPWEFEVSFDPRELCKETRLLYEIKWGRSQHVWRHSGKNTTNHVECNFIEKFTSERPFHRSVSCCITWFLSWSPCWECSKAIREFLNQHPRVTLFIYVARLFQHMDPQNRQGLRDLIHSGVTIQIMGPTEYDYCWRNFVNYPPGKEAHWPRYPPPLMKLYALELHCIILVP

SEQ ID NO: 90 - protein, 180 aa, synthetic construct
  REGION 1..180: note = pYY-BEM3.22; tr|E2D879|E2D879_MUSMI polypeptide sequence
RNLISRETFNFNFENLCYAKGRKNTFLCYEVTRKDCDSPVSLCHGVFKNKGSIHAEICFLYWFHDKVLKVLTPREEFKVTWYMSWSPCFECAEQVVRFLATHHNLNLTIFSSRLYNVSDPDTQQKLCRLVQEGAQVAVMDLSEFKKCWEKFVDNDGQQFRPWKRLRTNFRYQNSKLQEIL

SEQ ID NO: 91 - protein, 221 aa, synthetic construct
  REGION 1..221: note = pYY-BEM3.23; tr|A0A2K5RDN6|A0A2K5RDN6_CEBCA polypeptide sequence
MWEAQSPGLSREWGSVAISPEDPGPLHIGRFLSCAFRHPMNAMYPGIFNFHFRNLRKAYGRNETWLCFTVEGIMNRSTVSWKSGVFRNQVGSDPFCHAEMCFLSWFRHNMLSPKKDYEVTWYASWSPCPECAGQVAEFLARHGNVRLTIFTAHLYYFWNPSFRQGLRRLSQEGASVLIMGYEDFEYCWDNFVYNDGQPFKPWKRLQDNSLSLYITLQEILQ

SEQ ID NO: 92 - protein, 206 aa, synthetic construct
  REGION 1..206: note = pYY-BEM3.24; tr|A0A2K5RDN7|A0A2K5RDN7_CEBCA polypeptide sequence
MEASPASRPRPLMGPRTFTENFTNNPEVFGRHQTYLCYEVKCQGPDGTRDLMTEQRDFLCNQARNLLSGFDGRHAERCFLDRVPSWRLDPAQTYRVTCFISWSPCFSCAREVAEFLQENPHVNLRIFAARIYDCRPRYEEGLQMLQNAGAQVSIMTSEEFRHCWDTFVDHQGHPFQPWEGLDEHSQALSRRLQAILQGNRWMILSL

SEQ ID NO: 93 - protein, 184 aa, synthetic construct
  REGION 1..184: note = pYY-BEM3.25; tr|A0A1C9CJ69|A0A1C9CJ69_CERAL polypeptide sequence
NPMKAMDPHIFYFHFKNLRKAYGRNETWLCFAVEIIKQRSTVPWRTGVFRNQVDPESHCHAERCFLSWFCEDILSPNTDYRVTWYTSWSPCLDCAGEVAEFLARHSNVELAIFAARLYYFWDTHYQQGLRSLSEKGASVEIMGYEDFKYCRENFVCDDGKPFKPWKGLKTNFRFLKRRLQEILE

SEQ ID NO: 94 - protein, 197 aa, synthetic construct
  REGION 1..197: note = pYY-BEM3.26; tr|A0A2R2Z4D2|A0A2R2Z4D2_PTEAL polypeptide sequence
MHLQVWRKVTEAWREGYTLKPWSRNPMERLYHDYFYFHFYNLPTPKHRNGCYICYQVEGTKKHSRMPLLRGVFENQESLDMMLSPGEKYRVTWYISWSPCFACVDEVIKFLREHTNVELIIFAARLYHSDILQYRQGLRKLHDAGVHVAIMSYYEFKHCLNDFVFHQGRSFCPWNDLNKNSKNLSNTLEDILRNQED

SEQ ID NO: 95 - protein, 206 aa, synthetic construct
  REGION 1..206: note = pYY-BEM3.27; tr|B7T161|B7T161_SHEEP polypeptide sequence
MTEGWAGSGLPGRGDCVWTPQTRNTMNLLRETLFKQQFGNQPRVPPPYYRRKTYLCYQLKELDDLMLDKGCFRNKKQRHAEIRFIDKINSLNLNPSQSYKIICYITWSPCPNCASELVDFITRNDHLNLQIFASRLYFHWIKPFCRGLHQLQKAGISVAVMTHTEFEDCWEQFVDNQLRPFQPWDKLEQYSASIRRRLQRILTAPT

SEQ ID NO: 96 - protein, 205 aa, synthetic construct
  REGION 1..205: note = pYY-BEM3.28; tr|A0A2R2X2G4|A0A2R2X2G4_PTEAL polypeptide sequence
MAGLGQACEGCCGQMPEISYPMGRLDPKTFSFEFKNLPYAYGRKSSYLCFQVEREQHSSPVPSDWGVFKNQFCGTEPYHAELCFLNWFRAEKLSPYEHYDVTWFLSWSPCSTCAEEIAIFLSNHKNVRLNIFVSRIYYFWKPAFRQGLQELDHLGVQLDAMSFDEFKYCWENFVDNQGMPFRCWKKVHQNYKSVLRKLNEILRRR

SEQ ID NO: 97 - protein, 309 aa, synthetic construct
  REGION 1..309: note = pYY-BEM3.29; tr|G1Q1M4|G1Q1M4_MYOLU polypeptide sequence
YAELSFLDLFQSWNLDRGRQYRLTWYMSWSPYPDCAQKLVEFLGENSHVTLRIFAADIHSLCSGYEDGLRKLRDARAQLAIMTRDELQYCWVTFVDNQGQPFRPWPNLVEHIKTKKQELKDILGNPMRRMYPKTFNFNFQNLNSYGRKSTFLCFEVETWEDGSVLDYQNGVFQNQLDPGHAELCFIEWFHEKVLFPDEVRCPDAQYHVTWYISWSPCFECAEQVAGFLNEHENVDLSISAARLYLCEDEDEQGLQDLVAAGAKVAMMAPEDFEYCWDNFVYNRGWPFTYWKHVRRNYGRLQEKLDEILW

SEQ ID NO: 98 - protein, 216 aa, synthetic construct
  REGION 1..216: note = pYY-BEM3.30; tr|A0A1S3AN78|A0A1S3AN78_ERIEU polypeptide sequence
RRIEPWEFEDFFDPRQFRPETCLLYEVRWGSSRNAWRSTARNTTRHAEVNFLERFAAERHFDKPVSCSITWFLSWSPCWECSQAIGAFLSQHPQVTLAIHVTRLFHHEDEQNRQGLRDLLARGVTLQVMGDSEYAHCWRTFVNSPPGAEGHYPRYPSDFTRLYALELHCIILGLPPCLEILRRYQNQFTLFRLVPQNCHYQMIPHLNFFVVRHYFF

SEQ ID NO: 99 - protein, 201 aa, synthetic construct
  REGION 1..201: note = pYY-BEM3.32; tr|Q4VUI3|Q4VUI3_XENLA polypeptide sequence
MTMDSMLLKRNKFIYHYKNLRWARGRHETYLCYIVKRRYSSVSCALDFGYLRNRNGCHAEMLFLRYLSIWVGHDPHRNYRVTWFSSWSPCYDCAKRTLEFLKGHPNFSLRIFSARLYFCEERNAEPEGLRKLQKAGVRLSVMSYKDYFYCWNTFVETRESGFEAWDGLHENSVRLARKLRRILQPPYDMEDLREVFVLLGL

SEQ ID NO: 100 - protein, 191 aa, synthetic construct
  REGION 1..191: note = pYY-BEM3.33; tr|E2RL86|E2RL86_CANLF polypeptide sequence
MNPLQEETFYQQFSNQRVPKPTYQRRTYLCYQLKPHEGSVIAKVCLQNQEKRHAEICFIDDIKSRQLDPSQKFEITCYVTWSPCPTCAKKLIAFVNDHPHISLRLFASRLYFHWRQKYKRELRHLQKSGIPLAVMSYLEFKDCWEKFVDHKGRPFQPWNKLKQYSESIGRRLQRILQPLNNLENDFRNLRL

SEQ ID NO: 101 - protein, 226 aa, synthetic construct
  REGION 1..226: note = pYY-BEM3.34; tr|G1LWB0|G1LWB0_AILME polypeptide sequence
SSAAPASIHLLDEDTFTENFRNDDWPSRTYLCYKVEGPDQGSGVPLGQDKGILHNKPAQGPEPSRHAECYLLEQIQSWNLDPKLHYGVTCFLSWSPCAKCAQKMARFLQENSHVSLKLFASRLYTRERWDEDYKEGLRTLKRAGASIAIMTYREFEHCWKTFVLHDQEGSCFQPWPFLHKESQKFSEKLQAILQVGVLLLSLPPPLPSSPLSSPWPFPAPLRASTG

SEQ ID NO: 102 - protein, 238 aa, synthetic construct
  REGION 1..238: note = pYY-BEM3.35; tr|A0A1U7S7K7|A0A1U7S7K7_ALLSI polypeptide sequence
MGEHWQYAGSGEYIPQDQFEENFDPSVLLAETHLLSELTWGGRPYKHWYENTEHCHAEIHFLENFSSKNRSCTITWYLSWSPCAECSARIADFMQENTNVKLNIHVARLYLHDDEHTRQGLRYLMKMKRVTIQVMTIPDYTYCWNTFLEDDGEDESDDYGGYAGVHEDEDESDDDDYLPTHFAPWIMLYSLELSCILQGFAPCLKIIQGNHMSPTFQLHVQDQEQKRLLEPANPWGAD

SEQ ID NO: 103 - protein, 220 aa, synthetic construct
  REGION 1..220: note = pYY-BEM3.36; tr|A0A2R2X2J8|A0A2R2X2J8_PTEVA polypeptide sequence
MPRIGNMNLLSEKTFNYHFGNQLRVKKPQGRRRTYLCYKLKLPNETLVKGYFINKKKNHAEIRFINKIRSLNLDQTQSYKITCYITWSPCSYCAGKLVALVKSCPHLSLQIFTSRLYYHWLWKNQAGLRYLWKINISVLVMKEPEFADCWDNFVNHQSRRFKPWEKLTQYSNSTERRLLRILRINRTDLFLAQSSEQDPGLNDLVDAIKRLFLDAHRPRD

SEQ ID NO: 104 - protein, 198 aa, synthetic construct
  REGION 1..198: note = pYY-BEM3.37; tr|A0A151P6M4|A0A151P6M4_ALLMI polypeptide sequence
MAVEEEKGLLGTSQGWKIELKDFQENYMPSTWPKVTHLLYEIRWGKGSKVWRNWCSNTLTQHAEVNCLENAFGKLQFNPPVPCHITWFLSWSPCCQCCRRILQFLRAHSHITLVIKAAQLFKHMDERNRQGLRDLVQSGVHVQVMDLPDYRYCWRTFVSHPHEGEGDFWPWFFPLWITFYTLELQHILLQQHALSYNL

SEQ ID NO: 105 - protein, 158 aa, synthetic construct
  REGION 1..158: note = pYY-BEM3.38; tr|A0A2K6MNR2|A0A2K6MNR2_RHIBE polypeptide sequence
IWLCFTMEIIKQCSTVSWKRGVFRNQVDPETHCHAERCFLSWFWEDTLSPNTNYQVTWYTSWSPCLDCAGEVAEFLARHSNVKLAIFAARLYYFWDTDYQQGLRSLSEEGTSVEIMGYEDFKYCWENFVYNGDEPFKPWKGLKYNFLFLDSKLQEILE

SEQ ID NO: 106 - protein, 182 aa, synthetic construct
  REGION 1..182: note = pYY-BEM3.40; tr|F1CGT0|F1CGT0_ANOCA polypeptide sequence
KAAILLSNLFFRWQMEPEAFQRNFDPREFPECTLLLYEIHWDNNTSRNWCTNKPGLHAEENFLQIFNEKIDIKQDTPCSITWFLSWSPCYPCSQAIIKFLEAHPNVSLEIKAARLYMHQIDCNKEGLRNLGRNRVSIMNLPDYRHCWTTFVVPRGANEDYWPQDFLPAITNYSRELDSILQD

SEQ ID NO: 107 - protein, 230 aa, synthetic construct
  REGION 1..230: note = pYY-BEM3.41; tr|C7AGG3|C7AGG3_HORSE polypeptide sequence
MDPQAPTQRGGLGQAYQGGDYVQAPGNGNTQHLLSEDVFKKQFGNQRRVTKPYYRRKTYVCYQLKLLRGPTIAKGYFRNKKKRHAEIRFIDKINSLGLDQDQSYEITCYVTWSPCATCACKLIKFTRKFPNLSLRIFVSRLYYHWFRQNQQGLRQLWASSIPVVVMGYQEFADCWENFADNRGNPFQSWEKLTEYSKGIKRRLQKILEPLNLNGLEDAMGNLKLGSVDLG

SEQ ID NO: 108 - protein, 197 aa, synthetic construct
  REGION 1..197: note = pYY-BEM3.42; tr|A0A250YMK7|A0A250YMK7_CASCN polypeptide sequence
MSLLKEDIFLYQFNNQQQVQKPYFRRRTYLCYQLEQPNGSRPQWPAKGCLQNKKGHHAEIRFIKRIHSMGLEQDQDYQITCYITWSPCLACACALAELKNHFPRLTLRIFASRLYFHWIRKFQMGLQHLYKSGVLVAVMSLPEFTDCWEKFVNHRQVFFTPWDKLEEHSRSIQRRLRRILQSWDVDDLTDDFRNLRL

SEQ ID NO: 109 - protein, 189 aa, synthetic construct
  REGION 1..189: note = pYY-BEM3.43; tr|B7T160|B7T160_SHEEP polypeptide sequence
MPWISDHVARLDPETFYFQFHNLLYAYGRNCSYICYRVKTWKHRSPVSFDWGVFHNQVYAGTHCHSERRFLSWFCAKKLRPDECYHITWFMSWSPCMKCAELVAGFLGMYQNVTLSIFTARLYYFQKPQYRKGLLRLSDQGACVDIMSYQEFKYCWKKFVYSQRRPFRPWKKLKRNYQLLAAELEDILG

SEQ ID NO: 110 - protein, 541 aa, synthetic construct
  REGION 1..541: note = pYY-BEM4.1; tr|A0A182D0J1|A0A182D0J1_BLAVI polypeptide sequence
MTNPESPPQAPCDFNEDALLNREPLRGSPIKFVSPVDYPDLVFALAGPVGVDIDYIQQSISDCLKSFDYSTEFIRITEIMQDIKCSKTIDCTDMLKEYQSKIEYANELRRAYRAKDLLAALTISAISKLREQIKERDEATNKSNIQPSRRKLAWVVRQLKTPEEVRLLRAVYGKQFVLVSIYSSPQRREDFLISKIKIKSRGTIDNNTSSEGAQRLIERDSKEDNEYGQNLSGTFCLGDIFVDSNNKESAIVSIDRFLNAFFGSNEISPTRDEYGMYLAKTASLRSCDLSRQVGAAIFSKTGEIISLGSNEVPKAGGGTYWTGDNADSRDIRLGHDPNEINKVEIFAEIISRLLEDKLLSNDLLNKDAASIVTILLSKNEGKRYKDLRVMDIIEFGRIIHAEMSAICDAARNGRAIIGATLFCTTFPCHLCAKHIVASGIGRIVYLEPYPKSYAKKLHSDSIQVEDHSDSEKVSFEPFIGISPSRYRELFEGGRRKDPFGEALKWKNDPRKPVIDVVVPPHFEAEKLVIAQLGKLIVSGTG

SEQ ID NO: 111 - protein, 330 aa, synthetic construct
  REGION 1..330: note = pYY-BEM4.2; tr|A0A2D6EXD2|A0A2D6EXD2_9ARCH polypeptide sequence
MIIGLVGTIGAGKQTIIDYLQEKYGYNALSCSDVLREILKKQGKPVTRDNLREIGNKTREEGGNGAIAKILLEKLRNNWKANYIVDSLRHPDEVSVLRTSPLFHLVAVDADLRIRFERVKARKREEEPTTLPAFVERDQKEMFGTGNEQRIRETMELADELVLNNGTVEELKQRIDDLNLVSDERLRPSWDDYFMRLARLAAQRSNCMSRKVGAIITKDRRVIATGYNGTPRGVKNCNEGGCERCNSAVAKGTAISECLCLHGEENAIIEAGRVRSEGATIYTSFLPCLWCTKMIIQAGLKEVVFSEVYDLHEASIKLFETSGVLIRRLK

SEQ ID NO: 112 - protein, 367 aa, synthetic construct
  REGION 1..367: note = pYY-BEM4.3; tr|F7YVM7|F7YVM7_9THEM polypeptide sequence
MNEFKYMSLALKLAKKGKYTTSPNPMVGAVIVKDGKILATGYHKKAGQPHAEINALSKLNFQAQNCEMYVTLEPCSHYGRTPPCADAIIRSGIRKVVIATLDPNPLVNGKGVEKLKNAGIEVVCGVLEEKAKKLNEKFFKYITTKIPFVALKIAQTLDGKIALKNGESKWITSEKSREYVHKLRMEYDAVLTGIGTILKDDPQLNVRLKKVYKQPLRIILDSKLKIPLSAKVLEDPSKVIILTTALADKEKLEELRSKGVEVIITNEKNGIVDLESALKILGEKKITSVMVEAGPTLLTSFLKESLFDKIYLFIAPKIFGADSKSVFSELGLEDISKSQKFSLESVKKIGEDLLLELYPKQLKKLEE

SEQ ID NO: 113 - protein, 449 aa, synthetic construct
  REGION 1..449: note = pYY-BEM4.4; tr|A0A3M6UNF1|A0A3M6UNF1_9CNID polypeptide sequence
MEEKSELENELMRSTSPKPSVPNGSKGNECEQRETRITKENLYMVLALWMEEFPVVEQTSSAKRLNKVGVVFVLPTDRVLAADCSRDGVHGVARVMVNHCGKLEGCKVFVSRKPCSLCAKLLVQSKVSRVFYLPIEPESENKGEIARADNLFKNSSVGQSVFVPCVEQKVLDKLEDKLPKEIITPDDISECRDNLLKKCGWSAEWFARAQASLPWPCFEGKMKSQVDNDFKSLIKWIAVVKAPMDKGVAFPKVKLTSDSRVVPDCDADNFPDSKTAYHMMIFAKMLARQTDDPKTGVGAVIVRGKVPDIVSLGWNGFPSKALYGEFPRASDDDRALQKKFPYVIHAEQNALMVRNVKDLTDGILFVTKPPCDECAPMIKLSGVKTIVIGEKIEKSRGGELSYNLIKEYIKEGIMTCYQMEATKTKAKRLASDPETRKRLKSSCSNSNDV

SEQ ID NO: 114 - protein, 414 aa, synthetic construct
  REGION 1..414: note = pYY-BEM4.5; tr|A0A2G3K826|A0A2G3K826_9BURK polypeptide sequence
MTKIIDDVNTAAAAVLDQATAAANQTTFAVGGVMVNNQTGEVISAIHNNVIIPLSNNVSFTFDPTAHGERQLVYWYYANKEALKLPEPNQITVITSLDPCAMCTGALLTAGFNVGVVAIDTYAGINCAQNFQFATLPANLRTKAQKNFGYYASGAANFKPLTRSYVGGPSVAFKNGVVTPANLRDCGTVFTQSVDTVRNTSNSTGLAPSQMSNPAELPSNSAILQAYRAIYKKAFTIKIDNPRLPDAQILTELKAVLADAPNARNAVAFIDPFGNLVLCMADAFNTSPVHAAFMNVTQEYAKTRWDLMNKYAQASTTDNPALYLTHPKYGTFVYLYAPDPDDSITIMSLGAYGSTMEGPIPNMFPSNLQFYYPPRNGAQFSELVPVVNELPPFYTQNVNISLMQVPGVTQAPTK

SEQ ID NO: 115 - protein, 308 aa, synthetic construct
  REGION 1..308: note = pYY-BEM4.6; tr|K1ZCJ4|K1ZCJ4_9BACT polypeptide sequence
MSSRAKKNRSTNLKKSIGQKSIENKPTDQKKDQVLVAYVPVIHEGYRRFFRHFPAVKELWLISQELSHELRSLQKDIRALKASETKKLLQTWGQFQKIKLLTPSSLAILQKTTTQLVFPDEEISHHLVEKYFAQNRVLFASFFLRWDKKSSLKKHDLQEYSEISNKEFDQMMIAIAQQEADKSDDWWRQVGGLIFKDETILLLAHNQHTPTEAEAYFAGDPRADFHQGEYLKISTAIHAEAYLIAQAAKQGISLEGADLYVTTFPCPVCAKQVAYSGIKRVFFREGYSLLDGETILKANGVKLIRVTV

SEQ ID NO: 116 - protein, 615 aa, synthetic construct
  REGION 1..615: note = pYY-BEM4.7; tr|A0A1G3PNQ8|A0A1G3PNQ8_9SPIR polypeptide sequence
MRDLPLLVLGLTGPMGAGCTRFARDISKMEPGKVIKKQGLLDQVAHEISELSKKASEIRLQCISNGKNSELAELKRLNRRLNAKLAERACLHVIAKSSLPEPLFISLNTIVIKIAVDSITAPEFAEWAKNHAKVADLLKWLRTQWESELTLYETWGQDAGRFSQDELEKMDAMFAEFERIGDEILKEDFETYFGKRNNDFSIRMFSENIRLSGNPFRPAENGGGGGKYDEPSMVMIARETDRYIRFYRTRSDQKRSHFFIIDEIKNPREAEYFRARHQNFFLVSIFSSSEIRASRMRRGLGHDAGVSDADFQHLFRELDSRDWGADDFDAHGLHRQNIYRCFNLADIAINNDVEDERFSEVLFNKFIRYYALMLSPGCVQPTPQETYMHLAYSLSLRSTCISRQVGAVITDLEDRILSLGWNEVPEGQIGCGLKVKKDYTDKENPLFEMEIWDNVITAEDLAVWDDEDSICVKDILSRIEIKTKLKSVSLTPEERADVLKALRIKRLEYSRSLHAEENAILQVASRGGVGLKDGTIYVTTFPCELCSKKIYQVGISKIYYTEPYPNSISEKVILKDGIRNIKILQFEGVKSYSYFKLFKPGFDKKDAQMLEGRGI

SEQ ID NO: 117 - protein, 291 aa, synthetic construct
  REGION 1..291: note = pYY-BEM4.8; tr|A0A1G0PGF4|A0A1G0PGF4_9BACT polypeptide sequence
MKHNNQLRKEIEKLLGQNSIIKNDELKKLQKEYKIETDELLISFLPYAAEFAKVPISKYKVGAVVLGKSGNIYFGSNMEFEAGALSATVHAEQSAVNNAWLNGETGINKIAVTAAPCGYCRQFLNELTTAKQLHVLLKDKNLEAAKVFKLTELLPEAFGPRDLEIEGGLMKVENHKLKIENINDELINAALEAANKSYAPYSKNYSGVSIQLSDGTIFSGRYSENAAYNPSLLPFQSALAFMNMNTKKGSNNKIVDAVLVEAVSNISQKDAAGTLLNSISKTKLRYYKIKN

SEQ ID NO: 118 - protein, 398 aa, synthetic construct
  REGION 1..398: note = pYY-BEM4.9; tr|A0A0P4WGY5|A0A0P4WGY5_9EUCA polypeptide sequence
MEENSSATSQPKCASRTKQGGNDLSTDMSNLSVGETKRTDFLPWDDYFMAVAFLSAMRSKDPSSQVGACIVNADKKIVGIGYNGMPIGCSDDELPWNKESLDPLQTKYMYVCHAEMNAIMNKNSSDLAGCCVYVALFPCNECAKLVIQAGIREVVFFSDKHQQKPETVASKKMLNMAGVAYRQYTPSQSKIELNLSLKEQEKSEPTADITQSSERDQNSKRKDYLSWEEYFMAMAHLSALRSKDPITQVGACIVNSKKKIVGIGYNGMPLGCNDDLMPWGNSSSNKLETKYMYVCHAGVNAIMNKNSCDVSGCTLYVALFPCNECAKVIIQAGIKTIIYASDTNKDQASILASKKMLDMAGIKYRADNLSQRKIVIDFKTIDWNSRFMNDHQNDPTCL

SEQ ID NO: 119 - protein, 259 aa, synthetic construct
  REGION 1..259: note = pYY-BEM4.10; tr|A0A3D8IG27|A0A3D8IG27_9HELI polypeptide sequence
MRKNILYFILTLFFLSGLYATSLPEDNVVSGVIYEKIDTVSAEVDHIYPMLALAIVYKDWQEKNMLNKQGHNIGLVIVDENNMPVFWVRNSVHATHNGTQHGEVRLVSNLLNCEGFNKYLDKYTLYTTLEPCIMCAGMLSMVQIPKVVYAQKDLSCGNTQEIISTAKYPRYYKAFTVENGYKKDLEECFEQYKICKNDSITDFLVNDSAKEIFRKASNDLQDYKVKFKENRRVIKVAQEFLQNIQTKDNLDVLQCPKNM

SEQ ID NO: 120 - protein, 256 aa, synthetic construct
  REGION 1..256: note = pYY-BEM4.11; tr|A0A351C8C4|A0A351C8C4_9BACT polypeptide sequence
MNELTKQSEHLRNEALRIATRSYVPYTGQQEGVIILLENGDLIPGVRVENASFQLTIPALQNALSTMYALQRTDISMIVSSIPFTDSDLAYTGGMAEIAWEMVGASLLLVAGAHIPEAGTFIDPARGENLLDVSREAALNAFIPESDFPVGSAIQTSDDVVIDGCNVEHSDWSKIICAERNVLSTARSYGLGQITTIYVSCPKEPGGTPCGACRQVIVELAPDATVWMDRGNQEPIAMKATKLLPGHFTGNVLKKQ

SEQ ID NO: 121 - protein, 301 aa, synthetic construct
  REGION 1..301: note = pYY-BEM4.12; tr|A0A1G6V2K7|A0A1G6V2K7_PEPNI polypeptide sequence
MPIVRVNEIGARLPEDWEALETAIWQAYVSREDLPDAGELDLTLVDDATIQELNKTHRQLDKSTDVLSFPMYDDRDDLAADVQAGLPVILGDIMISVPTAERQAQAYGHSFKREMAYLLVHGLLHIAGYDHMSAEEKSAMRRAEEAILADVDVPRDTAPSKTAAVLDEADVQALIDAARAARLQAYAPYSGYAVGAALLAADGRRFCGVNVENASYGATCCAERTALFAAVTAGARDFIALALVTEGDEPAPPCGLCRQALAEFSPDLAIYLAGPTGETYRRTSLAALFPEAFSLSTKESV

SEQ ID NO: 122 - protein, 528 aa, synthetic construct
  REGION 1..528: note = pYY-BEM4.13; tr|F2NP91|F2NP91_MARHT polypeptide sequence
MPVMETHALEARFKEALARLCPEGRLLAAVSGGGDSVALLYLLKAAGRDTIVAHLDHALRPDSAADAAFVEKLAQRLGFPLETEHVDVRALAHRKRINLEAAAREVRYAFLARVARRWKARCILTAHTLDDNAETVLLQILRGAGRGLGIRPLQRRVARPLLEFSRAELRAYLEARGARWLEDPTNRSLELDRNYLRHAVLPRITARFPHALEALARFSQAQQADDWALEALSARHLIPDRRWPVPAYRALPLERAPEALRRRAIRGVLEALGVRPEARLVADVEAALGGRAQTLPGGVVVRRQRGTLFFIPPTVRFPKVQPPAGLEARPPRPGDYLVFPYGRKRLVDFLNERGVPRELKRRWPVGAVGAEVRWVYGLWPEPDEDRYMRRALVLARAAARQGEVPIGAVLVRDGAVLAEAANAVEASRDATAHAELLALRTALRRVGEKVLPGATLYVTLEPCPMCYGAILEARVARVVYGVENLKAGAFTVHGLEPRVALEAGRVEGECAKVLKDFFARLRPGRDGA

SEQ ID NO: 123 - protein, 226 aa, synthetic construct
  REGION 1..226: note = pYY-BEM4.14; tr|A0A316TX77|A0A316TX77_9BACT polypeptide sequence
MINGYTPYSGNQNTCYVKGESGTFYPGVRIENVSYPLTISSVQAAVCSCLANSDNPVEYYTGDHQPELLQVWADEYDMKPGGKLPDSPLKLFDPLVPSIPDIKKELDVLTEKSVTPNSGFPVSALLQTEKGYIRGVNIELSSWALGLCAERVAISRALTAGYTQFKSIHIYAPEADFVSPCGACRQVLLEVMPDADTELYHGDGTLSKHIVSDLLPFGFTSHKLKK

SEQ ID NO: 124 - protein, 321 aa, synthetic construct
  REGION 1..321: note = pYY-BEM4.15; tr|R6VYG3|R6VYG3_9FIRM polypeptide sequence
MIHKGTQTIETKRLILRAFTPDDAEAAFENWMSDPKVTEFLRWKTHADISDSRKIVNEWANGSADPEFYQWAIVPKDVNEPIGTISVVDRNDALGIFHIGYCIGSKWWHKGITSEAFSAVIHFLFEEVGANRIESQHDPENIHSGDVMKKCGLTFEGTLRQADFNNRGIVDACVYSILQSEWQNNTSVWQRLYNAALTVQNDRVVSPFIDAGGVAAALMTKKGNIYTGICIDTASTLGMCAERNAVANMLTNGESRIDKIVAVMPDGKVGAPCGACREYMMQLDRDSGDIEILLDLETEKTVRLKDLIPDWWGAERFGDTE

SEQ ID NO: 125 - protein, 229 aa, synthetic construct
  REGION 1..229: note = pYY-BEM4.16; tr|A0A3C1HZ18|A0A3C1HZ18_9BACI polypeptide sequence
MGDIMENWNELSEPWKRCFLQAWKAYCHGSIPIGAVLVDSEGEIFLEGRNRVHELTAPEGQLCDCRIAHAEMNVLVQVKTSDYEKLSGATIYSTMEPCIQCFGAIILSRIKNISFAAIDDKLAGATTLEDRHGFIKSRNLNIAGPFSHLGEIQIILRTDFLLRIFDSEYADPLIAAHEKDYPIGVALGRHYHRNNRLQVAKKETIPFGELFNEFSFDIKRAREGYTLGK

SEQ ID NO: 126 - protein, 205 aa, synthetic construct
  REGION 1..205: note = pYY-BEM4.17; tr|A0A1M6KV24|A0A1M6KV24_9BACT polypeptide sequence
MEASQQNILLKIEGKGPVAEINFTVTLPEWLVEQVQSGSTVFLTQKEKMRFVLELARKNVAQETGGPFAAAVFSLESGELVSAGVNVVVESRCSSAHAEVVALSLAQKAVDSHDLGAAGLPRMVLVSSAEPCAMCMGAIPWSGVKQVICGARDEDVRSVGFDEGAKPLEWVEDFAERGIEVIRDVLREEATEVLWDYRERGGEIY

SEQ ID NO: 127 - protein, 207 aa, synthetic construct
  REGION 1..207: note = pYY-BEM4.18; tr|A0A2U0T9B4|A0A2U0T9B4_9RHIZ polypeptide sequence
METAELISRLLDVIEKDIAPVTAKGVARGNKLFGAAILKKSDLAVIVAETNNEIENPLWHGEMQAIKRFFELPADQRPATRDCLFLATHEPCSLCLSGITWSGFDNFYYLFSHQDSRDGFAIPYDIQILKSVYAVPEPETGTVSPARDLYNRSNDFWTSHGLQDMIAGLARSNREALLARIDDLNALYAELSERYQRDKGGKGIPLP

SEQ ID NO: 128 - protein, 231 aa, synthetic construct
  REGION 1..231: note = pYY-BEM4.19; tr|A0A2K9PN08|A0A2K9PN08_9FLAO polypeptide sequence
MSDKKESKIKISKTSESIELDEIHSLLSYSIVQKFWENDDRNGRGYNVGVILVDENKNIVDWDINSVNKTENSTQHGEMRLISRYLDKDELYSLKGYTMYPTLEPCAMCAGMMTMTNVYRTVNGQMDYFYSKALERLSIDTRECGGYPPYPRTVISEISPSSISTRLDAEYKQYTNAGNKPIITKFLSTYKAKTIYDDAFNQFINFKCKFPENKTKYENAIKFYNSLPESI

SEQ ID NO: 129 - protein, 330 aa, synthetic construct
  REGION 1..330: note = pYY-BEM4.20; tr|F4PWM7|F4PWM7_CAVFA polypeptide sequence
MRFSLSLLFVILSVLLAGVLACKDPYNPETVDYGQCASATKANYEVRSDSKVLTPADLPADELAVHESRMRHIIDIARVNNKKFVSSIYFPNGTLACIGINTGKPNMIAHGEIVAIQNCTEIHGISMYTNYSIYTTGEPCSMCASAILWSRFKTVVWSTYNSDLYCKICMSNIPIDSSYIFSRAYGLGIEAPVAIGGVVKAEGDAWFGTYCNRPTSIYYIAPKCACQDPAKVSPLKFTQTRTTVWVEGGDKVVTQWNAIISNPSNSTIVDPPIVISPSVVFKGAPWGISAASEPNTYKLSYNKVLFPGQTFSFGYSVYGLEEVAFTALEA

SEQ ID NO: 130 - protein, 193 aa, synthetic construct
  REGION 1..193: note = pYY-BEM4.21; tr|U7QZM1|U7QZM1_PHOTE polypeptide sequence
MNKTRRKLLATLGIMSISMSFIAQAGEKKTQVINNILSKQEITEHEKYMREAIKEAIKNPKHPFGAVIVNRNNGEILSRGVNTGRNNPILHGEIQAINHYITQYGNQGWENVALYTTGEPCSMCMSALVWIGIREVIWATSISVIRNSGIRQIDISAHEIAERASSFYNPITLVGGILANETDKLFLERKRGN

SEQ ID NO: 131 - protein, 319 aa, synthetic construct
  REGION 1..319: note = pYY-BEM4.22; tr|A0A081CH48|A0A081CH48_PSEA2 polypeptide sequence
MASRRHLLATQVTGNHRKLSLWHLRGWLSPYTKLVDAVYFLTTNSFYHSLQTPPVQSITMLLSSIITSLALAAQASAYREGLHPEFQSGLSINSVPATDRDHWMRLANSAIYYPPVSHPCPQAPFGTAIVNTTSNELICAIANRVGSTGDPTQHGEITAIQHCTNVMRKKGLSPQEIIAAWKQLSLYTNAEPCTMCLSAIRWAGFKEVIYGTSVGTISENGRNQIYIPSNLVLEKSYSFGHATLMLGNILTHETDPFFQHQFNESAPCPVGCERTQVGEARVKTCEPVPNWQKLVRLEYSEDSRVGSEPVAHTPLHLEL

SEQ ID NO: 132 - protein, 203 aa, synthetic construct
  REGION 1..203: note = pYY-BEM4.23; tr|A0A3D3HMU1|A0A3D3HMU1_9GAMM polypeptide sequence
MDYSDAILGAITSIRRNSKQPGVNVTDNVTDSSTQYNNDEYWMRRALALAREAGEAGEIPVGAVLVKDNQQVAGGFNQPIRSHDPAAHAEILTLREAGAVLGNYRLIDTTLYVTLEPCMMCAGALVHSRIKRLVFGAAEPKTGAAGSFIDLLTLPRLNHYMEVTGGVLGEECSVLLSDFFRRRRAEKKALKRQNSESGSDSAS

SEQ ID NO: 133 - protein, 270 aa, synthetic construct
  REGION 1..270: note = pYY-BEM4.24; tr|A0A1N5WT13|A0A1N5WT13_9ACTN polypeptide sequence
MLEKIERRLVAAAEAVVRSPSTGDAHTVAAAAMDANGDIYSGVNVFHFTGGPCAELVVIGSAAAANAPPLITIVAVGDGDRGVIAPCGRCRQVMLDLHPDVFVIVPTGDGQLAAKPVRELLPFGYVARTGSTAPRVVYFHPRHYDTISSGLKTATVRFQDSVQTGPAVFVFDDGESIRRLDAVVEKVESRRLDHLTEEDAHHEALPDSDALRDAIKTQYPMLGDGDVVDVATFRLTAISAPDPDPRSSYPPAVSRCNPAGPRADLLVGQS

SEQ ID NO: 134 - protein, 257 aa, synthetic construct
  REGION 1..257: note = pYY-BEM4.25; tr|X0SAC5|X0SAC5_9ZZZZ polypeptide sequence
MTKDGRVIASAHDTEVTDQDSTAHAEINAIRKASKIYRKDLTGCLIISTHEPCPMCTGSIIWSNISKVVYGVSIRDSIKAGRDMINLSCKEIIKKPNAEINIYDGILKKECLKLYNNDTRKLVKKFRKYEWINIEENLLNKRMQWFENNKTMIRKLKGNDLEKAYHLILMKIGIKRSEAPIVKKSESKIIFHSKNYCPSLEACIILDLDTREVCKEIYERPTEELIRRLNSKLRFTRNYDCIRPYSDYCEEIIILEK

SEQ ID NO: 135 - protein, 154 aa, synthetic construct
  REGION 1..154: note = pYY-BEM4.26; tr|A0A3B8IC10|A0A3B8IC10_9BACT polypeptide sequence
MPSHEDFIHQCLELGKEALLQGNPPVGSVIVWQDQVIGRGIENGRSSGDITQHAELLALQEAVATGQRDKLKEAIIYSTHEPCVMCAYPIRQYKIPTVVYSVAVPELGGHTSSWHLLTTEDVPKWGKAPKIITGISAEEVEALNAAFQDSLKKG

SEQ ID NO: 136 - protein, 180 aa, synthetic construct
  REGION 1..180: note = pYY-BEM4.27; tr|A0A2N9P8B9|A0A2N9P8B9_9FLAO polypeptide sequence
MFIFKLISPPVSIEVYQDKIIQKLYICFMENIFTDEYFMKKALQEAETAFQQGEIPVGAVIVIDNRIIARSHNLTEMLNDVTAHAEMQAITASANFLGGKYLKDCTLYVTLEPCQMCAGALYWSQISKIVYGATDEQRGYRAMGAQLHPKTKVISGIMQNECTHLMKDFFKQRRSKSTKD

SEQ ID NO: 137 - protein, 178 aa, synthetic construct
  REGION 1..178: note = pYY-BEM4.28; tr|K1KX30|K1KX30_9BACT polypeptide sequence
MVKNPVNNNELYFGKHSEIPMNEEQKAYMKMAVDLSRSGMESGKGGPFGCVIVKDGKVIGIGSNSVLETNDPTAHAEIVAIRDACRNLGHFQLDGCEVYTSCEPCPMCLGAIYWARPSKVFFANDKRDAAEAGFDDDFIYQELELPYEKRKIPFEQGMQDTAKEVFQEWILKEDKTLY

SEQ ID NO: 138 - protein, 196 aa, synthetic construct
  REGION 1..196: note = pYY-BEM4.29; tr|R4XI84|R4XI84_TAPDE polypeptide sequence
MSSEIEPPSTDVHKHAVAEAADESGAADAFMQIALQQAETALLNKEVPVGCVFVHQPTGTVLATGANQTNASLNGTLHAEFVAIESILRDHPPSIFRESDLYVTVEPCVMCASALRQLQVRKVYFGCGNDRFGGCGSVFSIHSDASKTGDAAYMVESGIFRKEAIMLLRRFYLLQNESAPKPALKSTRVLKEHFDE

SEQ ID NO: 139 - protein, 212 aa, synthetic construct
  REGION 1..212: note = pYY-BEM4.30; tr|A0A239CVF7|A0A239CVF7_9DELT polypeptide sequence
MSPASKKHFPSLFSFLLLTIGLICGTAHAQPQGHTADDTAATLANASLKEHEPFIRRCYQLAIDAGKKGNHPFGALLVHKGKIVLEAENTVLTDNDFTNHAEMNLIAEAARTLSRQIIPEATVYTSCAPCAMCTATLAMAGFTRIVYGVSHDALNKRFGLKGKSVSCPALFKTMGMELEFVGPVLEKEGLRVFDFWPEKDPHAQMLKKQARK

SEQ ID NO: 140 - protein, 320 aa, synthetic construct
  REGION 1..320: note = pYY-BEM4.31; tr|A0A1Q3NME1|A0A1Q3NME1_9BACT polypeptide sequence
MTEFNYDWAKLAFSSKRPLTNLKATFIIAPREISEKRFTQLLKEYLPKGDILLGISKEDYVEGLEGQPQFAMLQQKTLQKLIDKVNDASAHKVYTLRYFQRELPAIIEKLTPPRVVGIHGSWHHSFHTLPIYYLLSEKRIPYQLVAAFSDEDEARAYEVATDKKIVRPTLEGSFDDTTVLQLTDEVAKSSYDYGFQTGAILAEKVNGVYQPVAAGFNKVVPYQTYALLNGASRETNFSPANDMNHYDTIHAEMQILVEAAKQGISLKDKTLFVNLMPCPSCARTLSQTELSEIVYRIDHSGGYAVDLLTKVGKDIRRIVY

SEQ ID NO: 141 - protein, 180 aa, synthetic construct
  REGION 1..180: note = pYY-BEM4.32; tr|A0A2G6N4N7|A0A2G6N4N7_9DELT polypeptide sequence
MKERTVSYSDRHFMAEALEMAESALTQGEFPVGCVIADGTAVVARGHRTGTTAGAVNEIDHAEINALRHLGLAGEHLDRTDLTIYSTMEPCLMCFAAIVLSGINRIVYAYEDVMGGGTGCDLTGLPPLYRDAPLTLVAGVRRRASLNLFRRFFTDPENGYWAGSLLSRYTLNQTKDSHRL

SEQ ID NO: 142 - protein, 156 aa, synthetic construct
  REGION 1..156: note = pYY-BEM4.33; tr|A0A0G0RBB8|A0A0G0RBB8_9BACT polypeptide sequence
MQSVQYNKLTHLQRRALDEAEQVLENSYNPYSHFYVGACLISEDEQLIAGTNFENAAYGSAICAERAAVLRANAMSIRRFRGIAIIARGEDFNTTEVTGPCGSCRQVLYEISQVSGCDLQVILATSKKDKIVITTIRELLPLAFGPLDLGVDIGKY

SEQ ID NO: 143 - protein, 217 aa, synthetic construct
  REGION 1..217: note = pYY-BEM4.34; tr|A0A327L2Q5|A0A327L2Q5_9RHIZ polypeptide sequence
MVTSRDGEDEAMMARCVALSRIAVGKGEYPFGAVVAREGRIVAEAINRTIRDGDVSRHAEVIALARAQKAIGRRELRECSLYSNVEPCAMCSYCIREAWVGRVVYALGSPVMGGVSKWNILRDDGLSGRMPQVFDAAPEVVSGVLVEQAQAAWRDWSPLAWEMITLRGLMTDPSARPECRTRAARPRSLWHHLVALIERPPRPYVDPTSAAEGHADL

SEQ ID NO: 144 - protein, 162 aa, synthetic construct
  REGION 1..162: note = pYY-BEM4.35; tr|S2DR30|S2DR30_9BACT polypeptide sequence
MKMKKKIEITVSLEVIQKSEWSKEDRSLIERAIHAVEHAHAPYSNFMVGTALLLDNGQIFSANNQENVSFPVGICAERAVLSYAMGNFPNNRPVKLAVVAKRRSDSTWATVTPCGLCRQTINEYEVKFGHPIEILMLNPGEEILKASGIDQLLPFRFNDLNS

SEQ ID NO: 145 - protein, 153 aa, synthetic construct
  REGION 1..153: note = pYY-BEM4.36; tr|A0A369QGF1|A0A369QGF1_9BACT polypeptide sequence
MEEHEKWMHWCLNLAQQALQQGDFPVGAVVVQKGKLIGQGVEAGQLKKDITCHAEMEAIRDARQTINTADLQNCILYSTHEPCIMCSYVIRHHKISRVVVGTTVPEVGGSSSAYPLLSAPDISIWVAPPHLVTGVLAEACQALSQAYKQKFKK

SEQ ID NO: 146 - protein, 159 aa, synthetic construct
  REGION 1..159: note = pYY-BEM4.37; tr|A0A1W6X4U4|A0A1W6X4U4_9RHIZ polypeptide sequence
MTNPSRQERWDRRFLELAKVFGTWSKDRSAGTGCVIVGPDRLLRASGYNGFARGIDDEVPERHERPAKYSWTEHAERNAIYNAAKLGISLDGCTAYVNWFPCIDCARAIVQAGIVRLVGLHPDHADQRWGSEFKFATEMLRESGIEIILYDIPELAARK

SEQ ID NO: 147 - protein, 490 aa, synthetic construct
  REGION 1..490: note = pYY-BEM4.38; tr|A0A238BW09|A0A238BW09_9BILA polypeptide sequence
MEEMARKIRTKAKKANSYCNTMTFLISKASIVLLKAECKRIELTVVIFRFLIKMNASEPNNELCDMTVIKSMLKITHVIFDLDGLLIDTEVVFSKVNQCLLSKYNKKFTPHLRGLVTGMPKKAAVTYILEHEKLSAKVDVDEYCKKYDEMAEEMLPKCSLMPGVMKLVRHLKTHSIPMAICTGATKKEFEIKTRYHKELLDLISLRVLSGDDPAVKRGKPAPDPFLVTMDRFKQKPEKAENVLVFEDAANGVCAAIAAGMNVIMVPDLTYMKIPEGLQNKINSFSDNLIISNDLNVALMSLKKELSEEEVHFLNRAFEIAVDAVLNNEVPVGCVFVFEGQEVAFGRNDVNRTKNPTYHAEMVALKMMKQWCMDNGRDLEEIMRRTTLYVTLEPCIMCASALYHLRLKKILYGAANERFGGLVSVGTREKYGAKHFIEIMPNLSVDRAVKLLKEFYEKQNPFCPEEKRKVKKPKKSGNNNDNSDDAVALNV

SEQ ID NO: 148 - protein, 159 aa, synthetic construct
  REGION 1..159: note = pYY-BEM4.39; tr|A0A1J5H6Z0|A0A1J5H6Z0_9BACT polypeptide sequence
MAYQPSEKFMQMAIDKTREGVLSGQTPFGACIVKDGKVVACEHNTVWQDTDITSHGEVHTIRAACKAIGSIDLSGCILYSTCEPCPMCFSAIHWARIDTVVYGAFIADAQDAGFNELTISNEKMKEFGGSPVNFISGFMRDENVALFKLWKEQGANNVY

SEQ ID NO: 149 - protein, 168 aa, synthetic construct
  REGION 1..168: note = pYY-BEM4.40; tr|A0A3C2D945|A0A3C2D945_9BACT polypeptide sequence
MKTTEIRIIVHEYQNIDELTENDQYLLHEARRITEFAYAPYSGFHVGAAILLGNGMIVKGNNQENSAYPSGLCAERVALFYANANYPDSEVKTIAISAAKNGILVNDPIKPCGGCRQTLSEAEVRFGSPIRIILDGQDSILVLHGVESLLPLSFSKKDLASPLAATGR

SEQ ID NO: 150 - protein, 214 aa, synthetic construct
  REGION 1..214: note = pYY-BEM4.41; tr|A0A1I7EYS3|A0A1I7EYS3_9BURK polypeptide sequence
MKFKLDPSRPPDEDDYYLGVALAVRRKANCTGNRVAAVIVKNKRVIATGYNGVPEDMPNCLDGGCLRCSNPGGQFKSGTRYDLCICVHAEQNALLTAARFGISVEGAHLYTTMQPCFGCAKEILQAKIEKVFYLHPWVPTDVDPVMDAAMKAEYAKIIGKLKVKKLDFDDPVATWAVTTMRQAALASDKNPDKKTPPKTAKKKVAKKKSRTSPR

SEQ ID NO: 151 - protein, 155 aa, synthetic construct
  REGION 1..155: note = pYY-BEM4.42; tr|H8GQX8|H8GQX8_METAL polypeptide sequence
MNHEHFMRRAIELARQAPQYPFGAVIVRRDDGQCVGQGFNRSDLNPTYHGEMVAINDCAVRHCAEDWRGFDLYTTAEPCAMCQGAIEWAGIGRVFYGTSIPYLQKLGWWQIDLRAAEVSARAVFRDTLIVGGILETECNALFAAARRGCFGTGSE

SEQ ID NO: 152 - protein, 156 aa, synthetic construct
  REGION 1..156: note = pYY-BEM4.43; tr|A0A0S8HZN3|A0A0S8HZN3_9CHLR polypeptide sequence
MDEHDIRFLRASFDVARNARKNGNHPFGALLVDEHGRIVMEAENTVITAKDCTGHAETNLMREASSKYDSDFLANCTIYTSTEPCPMCAGAIFWSNVRRVVYGLSEESLYEIAGRGSEEVLFLSCREIFERGKKLIEVIGPLLEDEAREVHMGFWR

SEQ ID NO: 153 - protein, 193 aa, synthetic construct
  REGION 1..193: note = pYY-BEM4.44; tr|E3SF31|E3SF31_9CAUD polypeptide sequence
MKPTTVLQIAYLVSQESKCCSWKVGAVIEKNGRIISTGYNGSPAGGVNCCEHAEEQGWLLNKPKPVLIPGHKSECVRFSQVDRFVLAKAHREAHSAWSKNNEIHAELNAILFAARMGSSIEGATMYVTLSPCPDCAKAISQSGIKKLVYCETYDKNIPGWDDILKNAGIEVFNVPKRSLDKLNWENINEFCGE

SEQ ID NO: 154 - protein, 330 aa, synthetic construct
  REGION 1..330: note = pYY-BEM4.45; tr|F8AAC6|F8AAC6_THEID polypeptide sequence
MIRAPWHEYFMLLAKIVALRSGCNSRPSGAVIVKNKRILATGYNGPMPGAWHCTDRGPGYCFRREKGIPDIDKYNFCRATHAEANAIAQAARFGISVEGASLYCTLAPCYVCLKLIASAGIKKVYYEHDYGSRDFERDQFWKEAIKEAGLEKFEQITVSQEVMEQLQEILPYPTSKRRLAPTEFLDEFEDGKKYGVPSIEVLFNKLNYLTRQALKDITFVIEKTTVTEEPEGISFYLSGKMVELSELINTVKKQINADQNFYFLAKHNAIEAKIEILREAENIRLKAFLNECPLESFKRIAESLDYILYQVSNSLSLPTRLELSVNLLRI

SEQ ID NO: 155 - protein, 158 aa, synthetic construct
  REGION 1..158: note = pYY-BEM4.46; tr|A0A2H4ZNK4|A0A2H4ZNK4_9EUKA polypeptide sequence
MKKQLSRKIQEEWMSRLLRNAYDAGTYGEVPIAAVILNESGQCIGWGRNCREKDQNPLGHAEIIALRQASYLKKSWRFNECTMLVTLEPCPMCAGALLQARINHIIYGASDYKRGGFGGVLDLSKNSSAHHKIEITRGVKSIQSCQLLETWFRRRRRV

SEQ ID NO: 156 - protein, 176 aa, synthetic construct
  REGION 1..176: note = pYY-BEM4.47; tr|A0A239N5N1|A0A239N5N1_9PSED polypeptide sequence
MEGRAGIIPFDEGGAAMGPAEEDSPMQHLAYMREALALARANVEAGGRPFGAVLVRDGEVIARAANGTHLDHDPTAHAELLALRAAGRALGSPRLDGCVVYASGHPCPMCLAAMHLSGVSAAYYAYSNADGEPYGLSTAAVYAQMAQPVEWQSLPLQALRPEDEEGLYGFWRERRP

SEQ ID NO: 157 - protein, 199 aa, synthetic construct
  REGION 1..199: note = pYY-BEM4.48; tr|A0A328VTR2|A0A328VTR2_9PSED polypeptide sequence
MHPEHLALLQQAPASTHADDTWARLCCEQALLAVEEGCYAVGALLVDGAGELLCSGRNQVFAPAYASAAHAEMRVLDQLEAEHAQVDRRSLTLYVSLEPCLMCYGRILLAGITRVRYLARDRDGGFALRHGRLPPAWANLASGLSVVQAKADPYWLDLAEHAIGRLQDRQTLRQRVIRAWRGQRTLTDEFSSTKRTHSG

SEQ ID NO: 158 - protein, 402 aa, synthetic construct
  REGION 1..402: note = pYY-BEM4.49; tr|A0A103YG48|A0A103YG48_CYNCS polypeptide sequence
YIRELHASSLRRDEHEIQNPKILVIVDRLSSPSLHVSLSLSLSLVIFPPFIPLNQTPTHMENAKVVEAKDGTIAVASAFSGHQEVVQDRDHKFLTRAVEEAYKGVECGDGGPFGAVVVHKDEVVASCHNMVLKHTDPTAHAEVTAIREACKKLNKIELSDCEIYASCEPCPMCFGAIHLSRIKRLIYGAKAEAAIAIGFDDFIADALRGTGFYQKAHLEIKQADGNGAMIAEQVFEKTKAKFAIDHKFLTRAVEEAYKGVECGDGRPFGALVVHKDEVVVSCHNMVLNYTDPTAHAEITAIREACKKLNRIELSDCEMYSSCEPCPMCFGAIQISRIKRLVYGAKAEASIASGIPIGDFISDALKGTGFHEKANFEIKQADGNGAMIAEQVFERTKAMFPKR

SEQ ID NO: 159 - protein, 195 aa, synthetic construct
  REGION 1..195: note = pYY-BEM4.50; tr|W5M1M8|W5M1M8_LEPOC polypeptide sequence
NSSTRESRVMAQMEINGGASPPKKPGKGQSAADQDMITGLINKALQAKEFAYCPYSNFRVGAALMTNDGRVFTGCNVENACYNLGVCAERTAILKAVSEGYESFRAIAVSSDLQDQFISPCGACRQVMREFGTGWDVFLTKVDGSYVRMTVDELLPMSFGPDDLKKKKVFSLQNGHEVSTQFYTHSPCEAGENNN

SEQ ID NO: 160 - protein, 134 aa, synthetic construct
  REGION 1..134: note = pYY-BEM4.51; tr|A0A3N5YPZ2|A0A3N5YPZ2_9ALTE polypeptide sequence
MSNSETEHIQALVDAAQAAQKQSYSPYSSFQVGAAIFADDGNTYSGCNIENVAYPLGQCAEATAIGMMIMQGAKRIEDIMIASPNDQVCPPCGGCRQKISEFGTAETKIHMVTRSGEVSTVTLGELLPLAFDSL

SEQ ID NO: 161 - protein, 162 aa, synthetic construct
  REGION 1..162: note = pYY-BEM4.52; tr|A0A2A9NC86|A0A2A9NC86_9AGAR polypeptide sequence
MTNSTLSNEDRTRLIQGAFQARKKTYSPYSNFPVGAALLTTDGRIIEGANIENASYGGTICAERTAIVKAVSDGYRHFAGIAVTTKMPTRVSPCGICRQVLREFCSLDMPVLLVPGDYPQRNPVDDDGADKPGVITEGGVRETTLGALLPDSFGPENLPPRA

SEQ ID NO: 162 - protein, 163 aa, synthetic construct
  REGION 1..163: note = pYY-BEM4.53; tr|A0A2D6RD43|A0A2D6RD43_9GAMM polypeptide sequence
MNIENLITENDETLIRRCIELAGESVKNGDKPFGALLAKDGNIIFESSNNAKTKVPYHAEILTLMDAQDKLNTTDLSDYALYSNCEPCPMCSFMIREYKLDKVVFSVHSPYMGGQSRWNILEDDVLTRFKPYFSKPPNVVGGVLESEGKRIFDKVGLWMFGKE

SEQ ID NO: 163 - protein, 204 aa, synthetic construct
  REGION 1..204: note = pYY-BEM4.54; tr|A0A0H3AVL6|A0A0H3AVL6_BRUO2 polypeptide sequence
MHAKGYSQQERRIIPFANRFRFRELCSNKSLHGLRAKFPEQYTKWDPMRKAASITKANSATPMDIALEEAHAAGERGEVPIGAVIVRDGEIIARAGNRTREFNDVTAHAEILTIRQAGEMLGSERLIDCDLYVTLEPCAMCAAAISFARIRRLYYGASDPKGGGIEHGGRFYTQPTCHHAPEIYPGFCEADARKILKDFFREKR

SEQ ID NO: 164 - protein, 165 aa, synthetic construct
  REGION 1..165: note = pYY-BEM4.55; tr|A0A242H531|A0A242H531_9ENTE polypeptide sequence
MFIVKNNIEVIQQQAELDAKFMKQALKLAKDASNNGNEPFGAVLVKNDKVILTGENQIHTESDPTYHAELGIIRDFCTSQKITDLSEYTLYTSCEPCCMCAGAMVWSNLDRMVYGLGHDELAEIAGFNIMIGSEEIFSKSPNRPEVAKGVLKEAAVPVYVDYFQR

SEQ ID NO: 165 - protein, 181 aa, synthetic construct
  REGION 1..181: note = pYY-BEM4.56; tr|A0A2R6XZE2|A0A2R6XZE2_9BACL polypeptide sequence
MSGRISWHEYFMAQAKLIALRATCTRLMVGAVIVRDRRVIAGGYNGSIAGDEHCIDVGCKVRDGHCIRTIHAEQNALMQCAKFGVSTDGAELYVTHFPCLNCTKLLIQAGIRHIYYEVPYRVDPYAIELLEKAGVGTTQITVDLNAYVQVMSKVSTDPALTYVPESKAQKDEYGQSVGKIV

SEQ ID NO: 166 - protein, 173 aa, synthetic construct
  REGION 1..173: note = pYY-BEM4.57; tr|A0A139SHT6|A0A139SHT6_9BACT polypeptide sequence
MSEANASSESLPSRNSPVELIAEAAGKFGRRPTWDEYFMATAVLISTRSSCERLNVGCVIVTAGESHKNRIVAAGYNGHLPGSPHTSRMRDGHEQATVHAEQNAISDAARRGSSVEGCTAYVTHYPCINCAKILASAGIAKICYRLDYHNDPLVKPMLAEAGIEIVQLGEAAS

SEQ ID NO: 167 - protein, 170 aa, synthetic construct
  REGION 1..170: note = pYY-BEM4.58; tr|A0A261DBH2|A0A261DBH2_9RICK polypeptide sequence
MVMKKKLITVKRSTEFNNFFMEEALKQAQFALDKNEIPVGAIIVNRITNKVIAKAHNIVEQTKNPVLHAEIVAINQSCQILSSKNLSDCDMYVTLEPCVMCSGAISFARIGRLFYAANDPKQGAIENGGRFFNSKSCFYRPEIYSGFSAKISENLIKEFFYNVRYQKCNP

SEQ ID NO: 168 - protein, 146 aa, synthetic construct
  REGION 1..146: note = pYY-BEM4.59; tr|A0A2N0XZK6|A0A2N0XZK6_9VIBR polypeptide sequence
MTDNSLHESYMRQAFELSKSALPGCRPNPPVGCVFVKDGEVVSSGFSQPPGNHHAEAGAIAAYTGSYDGLVAYVTLEPCSFQGRTPSCAKALVRVRPEKVYVAILDPDTRNSGAGIKILEDAGIDVEVGLLGEEVASFLNPYLIRN

SEQ ID NO: 169 - protein, 159 aa, synthetic construct
  REGION 1..159: note = pYY-BEM4.60; tr|A0A1V5R0F9|A0A1V5R0F9_9BACT polypeptide sequence
MTKKETTKLHALDDFCMKKALLLAKRAFRADEVPVGALVVDSSNKVIGRGYNQVEKRKSQRAHAEQLAIEQACKKIGDWRLEGCTLYVTLEPCTMCMGLIKLSRIERVVFGAASPLFGYQLDKNRKSQLYKKGVIKIRKGVGKATAAALLKDFFKNKRM

SEQ ID NO: 170 - protein, 167 aa, synthetic construct
  REGION 1..167: note = pYY-BEM4.61; tr|A0A2W0H8Y3|A0A2W0H8Y3_9BACI polypeptide sequence
MKNNGRLDHEYFMTEALQEAKEAGQRGDLPIGAVIVHNGRIIARGSNMRKTAGIKISHAENNAMHNCAPYLMKHASECVIYTTLEPCIMCLTTLVMANIDSIVFAADDKYMNMKPFIDANSYIRDRIHQYKGGVCRGESEALLRKYSPYAAELALNGTHPHHRKGGA

SEQ ID NO: 171 - protein, 165 aa, synthetic construct
  REGION 1..165: note = pYY-BEM4.62; tr|A0A261BDB7|A0A261BDB7_CAERE polypeptide sequence
LYKLYIFRMTTTKANLTQFEQELVDKAVGAMEKAYCKYSGFKVGAALVCEDGEIIIGANHENASYGATICAERSAMVTALTKGHRKFKLLAVATELEAPCSPCGICRQYLIEFGDYKVILGSSTSDQIIETTTYGLLPYAFTPKSLDDHEKEAEERNHQEGEKKH

SEQ ID NO: 172 - protein, 162 aa, synthetic construct
  REGION 1..162: note = pYY-BEM4.63; tr|A0A2E1PHI6|A0A2E1PHI6_9GAMM polypeptide sequence
MKELLIHSWLMLNSNSKLIMERVIELSEINLKNGKIPIAAVIVDKKNYEIISESQNEDSPIGHAELLAITKALKKLNTNRLDSTNLFVTIEPCPMCAYAISKCHINRLYFGSEDEKGGGVINGPRIFESHNLKKIDYVSHCYHEKTTQLMQSFFQLKRNQQL

SEQ ID NO: 173 - protein, 133 aa, synthetic construct
  REGION 1..133: note = pYY-BEM4.64; tr|A0A378LUA7|A0A378LUA7_9GAMM polypeptide sequence
MDTIIKKMISNAHNTLAHSYSPYSKFSVASCICTDKDNFYTGVNVENSAYGLAICAETSAISAMVTAGEKRIKSMVVMAGTNILCSPCGACRQRIYEFSTPDTLIHLCDKNSILRTFKINELLPEAFKFDFNP

SEQ ID NO: 174 - protein, 370 aa, synthetic construct
  REGION 1..370: note = pYY-BEM4.65; tr|A0A139HQ78|A0A139HQ78_9PEZI polypeptide sequence
MADSLKSKPGHARHDTALIHGLSQSDVQKLSESCVDAKSKAYCPYSHFRVGCAVLLANGDVVQGANVENAAYPVGTCAERVALGTAVGAKKGDFRALAVSTDISPPASPCGMCRQFIREFCELNTPILMYDKDGKSVVMTLEQLLPMSFGPDKLLPPGQLENGLMQTQTQSSFVTRAFSTTSSRRQDDTPQVPQSHYDFFPQTFPQGPPPKTSFSPDLKQLRKEFLQLQAKAHPDLAPQDQKRRAEALSMRINEAYKTLQSPLRRAQYLLSQQGIDVEDETAKLDDSSLLMEVMEAREAVEEVEDEEQLNEIRAENNGRIEESVRVLEDAFRDNEFEKAAQEAIRLRYWVNIEESIQGWEKGNGGGILHH

SEQ ID NO: 175 - protein, 165 aa, synthetic construct
  REGION 1..165: note = pYY-BEM4.66; tr|A0A2A9FXV0|A0A2A9FXV0_9VIBR polypeptide sequence
MCNLKENKDMDKYFHFACDATIEGMREGTGGPFGATLTRNGEVVCSVANTVLKDMDISGHAEMVAVREACKKLDTLDLSDCVMYATCEPCPMCVSVMLWAGIKTCYYASTHLDAAKHGFSDQQLRDYLDGSDTSTLNMVHIEDNRDDCAKIWTEFRHLNETKNDG

SEQ ID NO: 176 - protein, 509 aa, synthetic construct
  REGION 1..509: note = pYY-BEM4.67; tr|A0A1A8AG96|A0A1A8AG96_NOTFU polypeptide sequence
MEHSDRWSRAEPGLSTSSRETRDGSTQTDCKLQGHGPRLSKVNLFTLLSLWMELFPQEQDEENGQSQIRRSGLVVVREGKVVGLHCSGADLHAGQAAILQHGASLANCQLFFSRRPCATCLKMIINAGVRQITFWPGDPEISMLTSNQTHSQRTSQSITEASLDATAVEKLKSNSRPQICVLMQPLAPGVLQFVDETSRRSDFMERMMDDDPELDSEKLFNSDRLRHLKDFCRHFLIQTDQRHKDILSQMGLKNFCVEPYFSNLRSNMTELVEVLAAVAAGMPQQHYGFYREESLSLDPHPVDVSQAVARHCIVQARLLSYRTEDPKVGVGAVIWAKGQSACCCGTGRLYLIGCGYNAYPAGSKYAEYPQMDNKQEDRERRKYRYIVHAEQNALTFRTRDIKPDECSMLFVTKCPCDECIPLIRGAGVKHIYTSDQDRDKDKGDISYLRFGSLKGVCKFIWQRSPPVSSASSLHLTNGCVGKHVRQAEQQIYKNKKLCTKGSSGSSDIC

SEQ ID NO: 177 - protein, 148 aa, synthetic construct
  REGION 1..148: note = pYY-BEM4.68; tr|A0A3E2VN88|A0A3E2VN88_9FIRM polypeptide sequence
MEKEITNMDKQKLIQMAVDGLGRSYAPYSHFHVSAALLCADGTVYTGNNIENAAYTPSVCAERCAIFKAVGDGRREFEAIAVCGGPDGVIEDYCPPCGVCRQVMREFCDPSSFRVLVAKTAEDYREYTLEQLLPDGFGPDHLTGSGER

SEQ ID NO: 178 - protein, 221 aa, synthetic construct
  REGION 1..221: note = pYY-BEM4.69; tr|A0A2D5ZRJ2|A0A2D5ZRJ2_9BACT polypeptide sequence
MARPVHLHTGERRTEEGATESRAVAAVATAITRAPRAPPRPATGRERDGPPPRRVFGGGLRVGDPSGYDRGESKPIGGPLTEKRSDWHSYFMRIAGEVATRATCDRKHVGAVIVRNRTILSTGYNGSIRGMPHCDDVGHDMVDGHCIATIHAEANAILQAARNGVMIQDGSIYITASPCWNCFKLVANAGLKRVYYGEFYRDKRSFEVARRLGIDLMHIEV

SEQ ID NO: 179 - protein, 155 aa, synthetic construct
  REGION 1..155: note = pYY-BEM4.70; tr|A0A1B8WPS3|A0A1B8WPS3_9BACI polypeptide sequence
MEGVQLIYQFQWGNLIMTVNKEDLYLIDVARNTIKTLYVDGKHHVGAAVRTKTGKIYSAVHLEANIGRVSVCAEAIALGKAISEGESEFDTIVAVRHPDPTQENQKIEVVSPCGICRELISDYGKGTNVILKNKEGYIKTVISDLLPNKYIREDN

SEQ ID NO: 180 - protein, 156 aa, synthetic construct
  REGION 1..156: note = pYY-BEM4.71; tr|A0A1W5ZQK9|A0A1W5ZQK9_9BACI polypeptide sequence
MNRFMERAVSLAAENVRVGGQPFGAVLVKDDELVAEGVNEMHLNYDVSGHAELLAIRRAQGELQTHDLSGYTMYASGEPCPMCLSAMYFAGIKDVFYCATVEEAAQVGLEKSKNVYDDLQKSKGERSLVMKQMPLEDDQEDPMKLWDERTNHNGTS

SEQ ID NO: 181 - protein, 340 aa, synthetic construct
  REGION 1..340: note = pYY-BEM4.72; tr|A0A378V0W4|A0A378V0W4_MYCFO polypeptide sequence
MVHAQFDPTARQALAATAVEAKTRKDLTWQQIADAAELSPAFVTAAVLGQHALPARSAEAVAALLGLDDDAALLLQTIPIRGSIPGGIPTDPTIYRFYEMLQVYGTTLKALVHEQFGDGIISAINFKLDVRKVADPEGGERAVITLDGKYLPPNPFDRVRYRGGLMDFAQRTIDIARQNVAEGGRPFATVIVKNGEILAESPNLVAQTHDPTAHAEILAIRKACTRIGTEHLIGATIYVLAQPCPMCLGSLYYCSPDEVVFLTTRDAYEPHYVDDRKYFELNMFYDEFAKPWDQRRLPMRYEPRDAAVDVYKLWQERNGGERRVPGAPTSTRPGKNPRGE

SEQ ID NO: 182 - protein, 157 aa, synthetic construct
  REGION 1..157: note = pYY-BEM4.73; tr|I3XF03|I3XF03_RHIFR polypeptide sequence
MKQRCMSPKSAQRFWDNDMHNNKDRPMSENELFVAAREAMAKAHAPYSKFPVGAAIRAEDGQIYTGANIENLSFPEGWCAETTAISHMVMAGQRKIMEVAVIAEKLALCPPCGGCRQRLAEFSGASTRIYLCDETGIKKSLALSDLLPHSFETEILG

SEQ ID NO: 183 - protein, 595 aa, synthetic construct
  REGION 1..595: note = pYY-BEM4.74; tr|F8IEF3|F8IEF3_ALIAT polypeptide sequence
MDAKELETRGWLCMRAVDVIDKKRRGEALAEEELRFLIEGYVAGRIPDYQMSAFLMAVVWRGMTREETLVLTRLLADSGERLDLSGIPGVKVDKHSTGGVGDKATLVVLPLVASIGVPVIKMSGRGLGHTGGTIDKLESIPGFRTDLSVAELVAQVRQVGIALGGQTADLAPADKKLYALRDVTGTVESLPLIASSVMSKKLAGGADAIVLDVKVGDGAFMKSRSDARRLARLMVEIGEAAGRRTVAVLSNMDQPLGCAIGNALEVAEAIRVLSGEGPFDLAEIALALAEEMTVLAGVAATREEARRMLRQSVAEGRALETLRRWIAAQGGDPAVVDDPSRLPQAPVQMPYLPKKAGFVAKLSALAFGLAAMRLGAGRETKEEAIDPSVGIVLHAKVGDRVQTHRPMFTVHARTGEDALRCIQELEAAIQISDDPVEAPPLILARIDRSEALPYADLMDAAREARDRAYVPYSGFAVGAALELADGRMVTGANVENASYGLTNCAERSAVFRAVAEGGPGTKPEIRAVAVIADSPEPVSPCGACRQVLAEFCSPDTPVYLGNLQGDVRETTVGALLPGAFTDAQMANVRRQDKEA

SEQ ID NO: 184 - protein, 153 aa, synthetic construct
  REGION 1..153: note = pYY-BEM4.75; tr|A0A1G3M638|A0A1G3M638_9SPIR polypeptide sequence
MKTTNINALDKWDLRFLQMAEHVAEWSKDPSTKVGAVIVRPDRTIASVGFNGFARGVRDTVERLWNRELKYPLTVHAELNAILSAHEPVRGHSLYVSPLSPCSNCAGVIIQSGIARVVAKCGQVNNPAQWSESFNLALTAFAEAGVSVILVEH

SEQ ID NO: 185 - protein, 177 aa, synthetic construct
  REGION 1..177: note = pYY-BEM4.76; tr|A0A3D9LFR2|A0A3D9LFR2_9MICC polypeptide sequence
MEQNDHGSSGAFSDPFEDDIPLTASLPRITGTGSGIDWQRLESTARAAMTRAYVPYSRFPVGAAALVEDGRVVAGCNIENASLGLTLCAECSLVSNLQMSGGGRIVAFYCVDGNGEVLMPCGRCRQLLYEFHAPGMRLMGPDGELTMDEVLPLAFGPADMTHLSDSAASTDDPGRTR

SEQ ID NO: 186 - protein, 172 aa, synthetic construct
  REGION 1..172: note = pYY-BEM4.77; tr|A0A3B9YGB5|A0A3B9YGB5_9BACT polypeptide sequence
MAKPISKKYRKLIETAKAARKKAYSPYSRYQVGAAVLTESGRIYSGANMENASYGLCMCAERVAIANAVTRGEKVLQAVCVVGKKARPCGACRQVMLEFSTKETELLMVDIDPNARRDTVIRTRVYSMLPNPFDPFESGMLPQHPQNLLRRRKSPQPRRKRRSRPVHREVSR

SEQ ID NO: 187 - protein, 391 aa, synthetic construct
  REGION 1..391: note = pYY-BEM4.78; tr|A0A182F569|A0A182F569_ANOAL polypeptide sequence
MPRPSQFRVSSSQSLSNSQIQASQSSDSVVDITSYVNAVVKALLNLSCTKTIIKRADLVNIALKGNGRLIGRVLQDANIELKEIYGYELIEVEKSKTMILCSTLAAGSMDELNDANRRRYTFLYLILGYIFMKNGSVPETIVWEFLETLGIEEQQEHNYFGDVRKLYDSLFKQAYLTRTKQALEGLNDDVMLISWGVRSKHEVSKKDILAGFCKVMNRDPVDFKAQYIEANEKDDKMNNNINGTVDGRNTVEYSSLDASVKELIEAAIKVRNNAYCPYSNFAVGAALRTVGGDIVTGCNVENGTFGPSVCAERTAVCKAVSEGHREFTAVAVVAFQETEFTAPCGTCRQTLSEFSRKDIPIYLVKPSPVRVMVTSLFQLLPHAFSPSFLNK

SEQ ID NO: 188 - protein, 151 aa, synthetic construct
  REGION 1..151: note = pYY-BEM4.79; tr|A0A264Z0D4|A0A264Z0D4_9BACI polypeptide sequence
MEPKKLIEEAIVASKQAYVQYSNFHVGAALLTKDGKLYHGCNIENASYGLTNCAERTAIFKAVSEGEKEFQAIAVVGDTEGPISPCGACRQVLAEFFSPDTVVILANLKGDHVVTNINELLPGFFSSKDLQKKVKNCFEKNALGSSCLRPI

SEQ ID NO: 189 - protein, 229 aa, synthetic construct
  REGION 1..229: note = pYY-BEM4.80; tr|A0A1L9Q1R3|A0A1L9Q1R3_ASPVE polypeptide sequence
MPLSAEEAALVETATATINSIPLSEDYSVASAAKASDGRVFTGVNVYHFTGGPCAELVVLGVAAAAGAAQLTHIVAVANEQRGILSPCGRCRQVLLDLQPNIQVIVGKEGSEQSVPVAQLLPFSYRQPDQHTPVIFKALTSSGPVVVDFFATWCGPCKAVAPVVGKLSETYTDVRFIQVDVDKARSISQEHDIRAMPTFVLYKDGKLLDKRVVGGNMKELEEQIKAIIA

SEQ ID NO: 190 - protein, 18 aa, synthetic construct
  REGION 1..18: note = synthetic peptide
KRTADGSEFESPKKKRKV

SEQ ID NO: 191 - protein, 16 aa, synthetic construct
  REGION 1..16: note = synthetic peptide
KRPAATKKAGQAKKKK

SEQ ID NO: 192 - protein, 17 aa, synthetic construct
  REGION 1..17: note = synthetic peptide
KKTELQTTNAENKTKKL

SEQ ID NO: 193 - protein, 19 aa, synthetic construct
  REGION 1..19: note = synthetic peptide
KRGINDRNFWRGENGRKTR

SEQ ID NO: 194 - protein, 16 aa, synthetic construct
  REGION 1..16: note = synthetic peptide
RKSGKIAAIVVKRPRK

SEQ ID NO: 195 - protein, 7 aa, synthetic construct
  REGION 1..7: note = synthetic peptide
PKKKRKV

SEQ ID NO: 196 - protein, 30 aa, synthetic construct
  REGION 1..30: note = synthetic polypeptide
MDSLLMNRRKFLYQFKNVRWAKGRRETYLC

SEQ ID NO: 197 - protein, 1368 aa, Streptococcus pyogenes [sequence omitted]

SEQ ID NO: 198 - DNA, 4104 bp, Streptococcus pyogenes
  misc_feature 1..4104: note = wild type spCas9 polynucleotide sequence
  source 1..4104: mol_type = genomic DNA
atggataagaaatactcaataggcttagatatcggcacaaatagcgtcggatgggcggtgatcactgatgattataaggttccgtctaaaaagttcaaggttctgggaaatacagaccgccacagtatcaaaaaaaatcttataggggctcttttatttggcagtggagagacagcggaagcgactcgtctcaaacggacagctcgtagaaggtatacacgtcggaagaatcgtatttgttatctacaggagattttttcaaatgagatggcgaaagtagatgatagtttctttcatcgacttgaagagtcttttttggtggaagaagacaagaagcatgaacgtcatcctatttttggaaatatagtagatgaagttgcttatcatgagaaatatccaactatctatcatctgcgaaaaaaattggcagattctactgataaagcggatttgcgcttaatctatttggccttagcgcatatgattaagtttcgtggtcattttttgattgagggagatttaaatcctgataatagtgatgtggacaaactatttatccagttggtacaaatctacaatcaattatttgaagaaaaccctattaacgcaagtagagtagatgctaaagcgattctttctgcacgattgagtaaatcaagacgattagaaaatctcattgctcagctccccggtgagaagagaaatggcttgtttgggaatctcattgctttgtcattgggattgacccctaattttaaatcaaattttgatttggcagaagatgctaaattacagctttcaaaagatacttacgatgatgatttagataatttattggcgcaaattggagatcaatatgctgatttgtttttggcagctaagaatttatcagatgctattttactttcagatatcctaagagtaaatagtgaaataactaaggctcccctatcagcttcaatgattaagcgctacgatgaacatcatcaagacttgactcttttaaaagctttagttcgacaacaacttccagaaaagtataaagaaatcttttttgatcaatcaaaaaacggatatgcaggttatattgatgggggagctagccaagaagaattttataaatttatcaaaccaattttagaaaaaatggatggtactgaggaattattggtgaaactaaatcgtgaagatttgctgcgcaagcaacggacctttgacaacggctctattccccatcaaattcacttgggtgagctgcatgctattttgagaagacaagaagacttttatccatttttaaaagacaatcgtgagaagattgaaaaaatcttgacttttcgaattccttattatgttggtccattggcgcgtggcaatagtcgttttgcatggatgactcggaagtctgaagaaacaattaccccatggaattttgaagaagttgtcgataaaggtgcttcagctcaatcatttattgaacgcatgacaaactttgataaaaatcttccaaatgaaaaagtactaccaaaacatagtttgctttatgagtattttacggtttataacgaattgacaaaggtcaaatatgttactgagggaatgcgaaaaccagcatttctttcaggtgaacagaagaaagccattgttgatttactcttcaaaacaaatcgaaaagtaaccgttaagcaattaaaagaagattatttcaaaaaaatagaatgttttgatagtgttgaaatttcaggagttgaagatagatttaatgcttcattaggcgcctaccatgatttgctaaaaattattaaagataaagattttttggataatgaagaaaatgaagatatcttagaggatattgttttaacattgaccttatttgaagatagggggatgattgaggaaagacttaaaacatatgctcacctctttgatgataaggtgatgaaacagcttaaacgtcgccgttatactggttggggacgtttgtctcgaaaattgattaatggtattagggataagcaatctggcaaaacaatattagattttttgaaatcagatggttttgccaatcgcaattttatgcagctgatccatgatgatagtttgacatttaaagaagatattcaaaaagcacaggtgtctggacaaggccatagtttacatgaacagattgctaacttagctggcagtcctgctattaaaaaaggtattttacagactgtaaaaattgttgatgaactggtcaaagtaatggggcataagccagaaaatatcgttattgaaatggcacgtgaaaatcagacaactcaaaagggccagaaaaattcgcgagagcgtatgaaacgaatcgaagaaggtatcaaagaattaggaagtcagattcttaaagagcatcctgttgaaaatactcaattgcaaaatgaaaagctctatctctattatctacaaaatggaagagacatgtatgtggaccaagaattagatattaatcgtttaagtgattatgatgtcgatcacattgttccacaaagtttcattaaagacgattcaatagacaataaggtactaacgcgttctgataaaaatcgtggtaaatcggataacgttccaagtgaagaagtagtcaaaaagatgaaaaactattggagacaacttctaaacgccaagttaatcactcaacgtaagtttgataatttaacgaaagctgaacgtggaggtttgagtgaacttgataaagctggttttatcaaacgccaattggttgaaactcgccaaatcactaagcatgtggcacaaattttggatagtcgcatgaatactaaatacgatgaaaatgataaacttattcgagaggttaaagtgattaccttaaaatctaaattagtttctgacttccgaaaagatttccaattctataaagtacgtgagattaacaattaccatcatgcccatgatgcgtatctaaatgccgtcgttggaactgctttgattaagaaatatccaaaacttgaatcggagtttgtctatggtgattataaagtttatgatgttcgtaaaatgattgctaagtctgagcaagaaataggcaaagcaaccgcaaaatatttcttttactctaatatcatgaacttcttcaaaacagaaattacacttgcaaatggagagattcgcaaacgccctctaatcgaaactaatggggaaactggagaaattgtctgggataaagggcgagattttgccacagtgcgcaaagtattgtccatgccccaagtcaatattgtcaagaaaacagaagtacagacaggcggattctccaaggagtcaattttaccaaaaagaaattcggacaagcttattgctcgtaaaaaagactgggatccaaaaaaatatggtggttttgatagtccaacggtagcttattcagtcctagtggttgctaaggtggaaaaagggaaatcgaagaagttaaaatccgttaaagagttactagggatcacaattatggaaagaagttcctttgaaaaaaatccgattgactttttagaagctaaaggatataaggaagttaaaaaagacttaatcattaaactacctaaatatagtctttttgagttagaaaacggtcgtaaacggatgctggctagtgccggagaattacaaaaaggaaatgagctggctctgccaagcaaatatgtgaattttttatatttagctagtcattatgaaaagttgaagggtagtccagaagataacgaacaaaaacaattgtttgtggagcagcataagcattatttagatgagattattgagcaaatcagtgaattttctaagcgtgttattttagcagatgccaatttagataaagttcttagtgcatataacaaacatagagacaaaccaatacgtgaacaagcagaaaatattattcatttatttacgttgacgaatcttggagctcccgctgcttttaaatattttgatacaacaattgatcgtaaacgatatacgtctacaaaagaagttttagatgccactcttatccatcaatccatcactggtctttatgaaacacgcattgatttgagtcagctaggaggtgactga

SEQ ID NO: 199 - protein, 1367 aa, Streptococcus pyogenes
  REGION 1..1367: note = MISC_FEATURE - spCas9 polypeptide sequence
MDKKYSIGLDIGTNSVGWAVITDDYKVPSKKFKVLGNTDRHSIKKNLIGALLFGSGETAEATRLKRTARRRYTRRKNRICYLQEIFSNEMAKVDDSFFHRLEESFLVEEDKKHERHPIFGNIVDEVAYHEKYPTIYHLRKKLADSTDKADLRLIYLALAHMIKFRGHFLIEGDLNPDNSDVDKLFIQLVQIYNQLFEENPINASRVDAKAILSARLSKSRRLENLIAQLPGEKRNGLFGNLIALSLGLTPNFKSNFDLAEDAKLQLSKDTYDDDLDNLLAQIGDQYADLFLAAKNLSDAILLSDILRVNSEITKAPLSASMIKRYDEHHQDLTLLKALVRQQLPEKYKEIFFDQSKNGYAGYIDGGASQEEFYKFIKPILEKMDGTEELLVKLNREDLLRKQRTFDNGSIPHQIHLGELHAILRRQEDFYPFLKDNREKIEKILTFRIPYYVGPLARGNSRFAWMTRKSEETITPWNFEEVVDKGASAQSFIERMTNFDKNLPNEKVLPKHSLLYEYFTVYNELTKVKYVTEGMRKPAFLSGEQKKAIVDLLFKTNRKVTVKQLKEDYFKKIECFDSVEISGVEDRFNASLGAYHDLLKIIKDKDFLDNEENEDILEDIVLTLTLFEDRGMIEERLKTYAHLFDDKVMKQLKRRRYTGWGRLSRKLINGIRDKQSGKTILDFLKSDGFANRNFMQLIHDDSLTFKEDIQKAQVSGQGHSLHEQIANLAGSPAIKKGILQTVKIVDELVKVMGHKPENIVIEMARENQTTQKGQKNSRERMKRIEEGIKELGSQILKEHPVENTQLQNEKLYLYYLQNGRDMYVDQELDINRLSDYDVDHIVPQSFIKDDSIDNKVLTRSDKNRGKSDNVPSEEVVKKMKNYWRQLLNAKLITQRKFDNLTKAERGGLSELDKAGFIKRQLVETRQITKHVAQILDSRMNTKYDENDKLIREVKVITLKSKLVSDFRKDFQFYKVREINNYHHAHDAYLNAVVGTALIKKYPKLESEFVYGDYKVYDVRKMIAKSEQEIGKATAKYFFYSNIMNFFKTEITLANGEIRKRPLIETNGETGEIVWDKGRDFATVRKVLSMPQVNIVKKTEVQTGGFSKESILPKRNSDKLIARKKDWDPKKYGGFDSPTVAYSVLVVAKVEKGKSKKLKSVKELLGITIMERSSFEKNPIDFLEAKGYKEVKKDLIIKLPKYSLFELENGRKRMLASAGELQKGNELALPSKYVNFLYLASHYEKLKGSPEDNEQKQLFVEQHKHYLDEIIEQISEFSKRVILADANLDKVLSAYNKHRDKPIREQAENIIHLFTLTNLGAPAAFKYFDTTIDRKRYTSTKEVLDATLIHQSITGLYETRIDLSQLGGD

SEQ ID NO: 200 - DNA, 4212 bp, synthetic construct
  misc_feature 1..4212: note = wild-type Cas9 polynucleotide sequence
  misc_feature 5..58: note = RuvC domain
  misc_feature 718..764: note = RuvC domain
  misc_feature 772..901: note = HNH domain
  misc_feature 906..1101: note = RuvC domain
  source 1..4212: mol_type = other DNA
atggataaaaagtattctattggtttagacatcggcactaattccgttggatgggctgtcataaccgatgaatacaaagtaccttcaaagaaatttaaggtgttggggaacacagaccgtcattcgattaaaaagaatcttatcggtgccctcctattcgatagtggcgaaacggcagaggcgactcgcctgaaacgaaccgctcggagaaggtatacacgtcgcaagaaccgaatatgttacttacaagaaatttttagcaatgagatggccaaagttgacgattctttctttcaccgtttggaagagtccttccttgtcgaagaggacaagaaacatgaacggcaccccatctttggaaacatagtagatgaggtggcatatcatgaaaagtacccaacgatttatcacctcagaaaaaagctagttgactcaactgataaagcggacctgaggttaatctacttggctcttgcccatatgataaagttccgtgggcactttctcattgagggtgatctaaatccggacaactcggatgtcgacaaactgttcatccagttagtacaaacctataatcagttgtttgaagagaaccctataaatgcaagtggcgtggatgcgaaggctattcttagcgcccgcctctctaaatcccgacggctagaaaacctgatcgcacaattacccggagagaagaaaaatgggttgttcggtaaccttatagcgctctcactaggcctgacaccaaattttaagtcgaacttcgacttagctgaagatgccaaattgcagcttagtaaggacacgtacgatgacgatctcgacaatctactggcacaaattggagatcagtatgcggacttatttttggctgccaaaaaccttagcgatgcaatcctcctatctgacatactgagagttaatactgagattaccaaggcgccgttatccgcttcaatgatcaaaaggtacgatgaacatcaccaagacttgacacttctcaaggccctagtccgtcagcaactgcctgagaaatataaggaaatattctttgatcagtcgaaaaacgggtacgcaggttatattgacggcggagcgagtcaagaggaattctacaagtttatcaaacccatattagagaagatggatgggacggaagagttgcttgtaaaactcaatcgcgaagatctactgcgaaagcagcggactttcgacaacggtagcattccacatcaaatccacttaggcgaattgcatgctatacttagaaggcaggaggatttttatccgttcctcaaagacaatcgtgaaaagattgagaaaatcctaacctttcgcataccttactatgtgggacccctggcccgagggaactctcggttcgcatggatgacaagaaagtccgaagaaacgattactccatggaattttgaggaagttgtcgataaaggtgcgtcagctcaatcgttcatcgagaggatgaccaactttgacaagaatttaccgaacgaaaaagtattgcctaagcacagtttactttacgagtatttcacagtgtacaatgaactcacgaaagttaagtatgtcactgagggcatgcgtaaacccgcctttctaagcggagaacagaagaaagcaatagtagatctgttattcaagaccaaccgcaaagtgacagttaagcaattgaaagaggactactttaagaaaattgaatgcttcgattctgtcgagatctccggggtagaagatcgatttaatgcgtcacttggtacgtatcatgacctcctaaagataattaaagataaggacttcctggataacgaagagaatgaagatatcttagaagatatagtgttgactcttaccctctttgaagatcgggaaatgattgaggaaagactaaaaacatacgctcacctgttcgacgataaggttatgaaacagttaaagaggcgtcgctatacgggctggggacgattgtcgcggaaacttatcaacgggataagagacaagcaaagtggtaaaactattctcgattttctaaagagcgacggcttcgccaataggaactttatgcagctgatccatgatgactctttaaccttcaaagaggatatacaaaaggcacaggtttccggacaaggggactcattgcacgaacatattgcgaatcttgctggttcgccagccatcaaaaagggcatactccagacagtcaaagtagtggatgagctagttaaggtcatgggacgtcacaaaccggaaaacattgtaatcgagatggcacgcgaaaatcaaacgactcagaaggggcaaaaaaacagtcgagagcggatgaagagaatagaagagggtattaaagaactgggcagccagatcttaaaggagcatcctgtggaaaatacccaattgcagaacgagaaactttacctctattacctacaaaatggaagggacatgtatgttgatcaggaactggacataaaccgtttatctgattacgacgtcgatcacattgtaccccaatcctttttgaaggacgattcaatcgacaataaagtgcttacacgctcggataagaaccgagggaaaagtgacaatgttccaagcgaggaagtcgtaaagaaaatgaagaactattggcggcagctcctaaatgcgaaactgataacgcaaagaaagttcgataacttaactaaagctgagaggggtggcttgtctgaacttgacaaggccggatttattaaacgtcagctcgtggaaacccgccaaatcacaaagcatgttgcacagatactagattcccgaatgaatacgaaatacgacgagaacgataagctgattcgggaagtcaaagtaatcactttaaagtcaaaattggtgtcggacttcagaaaggattttcaattctataaagttagggagataaataactaccaccatgcgcacgacgcttatcttaatgccgtcgtagggaccgcactcattaagaaatacccgaagctagaaagtgagtttgtgtatggtgattacaaagtttatgacgtccgtaagatgatcgcgaaaagcgaacaggagataggcaaggctacagccaaatacttcttttattctaacattatgaatttctttaagacggaaatcactctggcaaacggagagatacgcaaacgacctttaattgaaaccaatggggagacaggtgaaatcgtatgggataagggccgggacttcgcgacggtgagaaaagttttgtccatgccccaagtcaacatagtaaagaaaactgaggtgcagaccggagggttttcaaaggaatcgattcttccaaaaaggaatagtgataagctcatcgctcgtaaaaaggactgggacccgaaaaagtacggtggcttcgatagccctacagttgcctattctgtcctagtagtggcaaaagttgagaagggaaaatccaagaaactgaagtcagtcaaagaattattggggataacgattatggagcgctcgtcttttgaaaagaaccccatcgacttccttgaggcgaaaggttacaaggaagtaaaaaaggatctcataattaaactaccaaagtatagtctgtttgagttagaaaatggccgaaaacggatgttggctagcgccggagagcttcaaaaggggaacgaactcgcactaccgtctaaatacgtgaatttcctgtatttagcgtcccattacgagaagttgaaaggttcacctgaagataacgaacagaagcaactttttgttgagcagcacaaacattatctcgacgaaatcatagagcaaatttcggaattcagtaagagagtcatcctagctgatgccaatctggacaaagtattaagcgcatacaacaagcacagggataaacccatacgtgagcaggcggaaaatattatccatttgtttactcttaccaacctcggcgctccagccgcattcaagtattttgacacaacgatagatcgcaaacgatacacttctaccaaggaggtgctagacgcgacactgattcaccaatccatcacgggattatatgaaactcggatagatttgtcacagcttgggggtgacggatcccccaagaagaagaggaaagtctcgagcgactacaaagaccatgacggtgattataaagatcatgacatcgattacaaggatgacgatgacaaggctgcagga

SEQ ID NO: 201 - protein, 1368 aa, synthetic construct
  REGION 1..1368: note = exemplary catalytically active Cas9 nickase (nCas9) polypeptide sequence
MDKKYSIGLAIGTNSVGWAVITDEYKVPSKKFKVLGNTDRHSIKKNLIGALLFDSGETAEATRLKRTARRRYTRRKNRICYLQEIFSNEMAKVDDSFFHRLEESFLVEEDKKHERHPIFGNIVDEVAYHEKYPTIYHLRKKLVDSTDKADLRLIYLALAHMIKFRGHFLIEGDLNPDNSDVDKLFIQLVQTYNQLFEENPINASGVDAKAILSARLSKSRRLENLIAQLPGEKKNGLFGNLIALSLGLTPNFKSNFDLAEDAKLQLSKDTYDDDLDNLLAQIGDQYADLFLAAKNLSDAILLSDILRVNTEITKAPLSASMIKRYDEHHQDLTLLKALVRQQLPEKYKEIFFDQSKNGYAGYIDGGASQEEFYKFIKPILEKMDGTEELLVKLNREDLLRKQRTFDNGSIPHQIHLGELHAILRRQEDFYPFLKDNREKIEKILTFRIPYYVGPLARGNSRFAWMTRKSEETITPWNFEEVVDKGASAQSFIERMTNFDKNLPNEKVLPKHSLLYEYFTVYNELTKVKYVTEGMRKPAFLSGEQKKAIVDLLFKTNRKVTVKQLKEDYFKKIECFDSVEISGVEDRFNASLGTYHDLLKIIKDKDFLDNEENEDILEDIVLTLTLFEDREMIEERLKTYAHLFDDKVMKQLKRRRYTGWGRLSRKLINGIRDKQSGKTILDFLKSDGFANRNFMQLIHDDSLTFKEDIQKAQVSGQGDSLHEHIANLAGSPAIKKGILQTVKVVDELVKVMGRHKPENIVIEMARENQTTQKGQKNSRERMKRIEEGIKELGSQILKEHPVENTQLQNEKLYLYYLQNGRDMYVDQELDINRLSDYDVDHIVPQSFLKDDSIDNKVLTRSDKNRGKSDNVPSEEVVKKMKNYWRQLLNAKLITQRKFDNLTKAERGGLSELDKAGFIKRQLVETRQITKHVAQILDSRMNTKYDENDKLIREVKVITLKSKLVSDFRKDFQFYKVREINNYHHAHDAYLNAVVGTALIKKYPKLESEFVYGDYKVYDVRKMIAKSEQEIGKATAKYFFYSNIMNFFKTEITLANGEIRKRPLIETNGETGEIVWDKGRDFATVRKVLSMPQVNIVKKTEVQTGGFSKESILPKRNSDKLIARKKDWDPKKYGGFDSPTVAYSVLVVAKVEKGKSKKLKSVKELLGITIMERSSFEKNPIDFLEAKGYKEVKKDLIIKLPKYSLFELENGRKRMLASAGELQKGNELALPSKYVNFLYLASHYEKLKGSPEDNEQKQLFVEQHKHYLDEIIEQISEFSKRVILADANLDKVLSAYNKHRDKPIREQAENIIHLFTLTNLGAPAAFKYFDTTIDRKRYTSTKEVLDATLIHQSITGLYETRIDLSQLGGD

SEQ ID NO: 202 - DNA, 4107 bp, Streptococcus pyogenes
  misc_feature 1..4107: note = Cas9 from Streptococcus pyogenes (NCBI Ref. Seq.: NC_002737.2)polynucleotide sequence
  source 1..4107: mol_type = genomic DNA
atggataagaaatactcaataggcttagatatcggcacaaatagcgtcggatgggcggtgatcactgatgaatataaggttccgtctaaaaagttcaaggttctgggaaatacagaccgccacagtatcaaaaaaaatcttataggggctcttttatttgacagtggagagacagcggaagcgactcgtctcaaacggacagctcgtagaaggtatacacgtcggaagaatcgtatttgttatctacaggagattttttcaaatgagatggcgaaagtagatgatagtttctttcatcgacttgaagagtcttttttggtggaagaagacaagaagcatgaacgtcatcctatttttggaaatatagtagatgaagttgcttatcatgagaaatatccaactatctatcatctgcgaaaaaaattggtagattctactgataaagcggatttgcgcttaatctatttggccttagcgcatatgattaagtttcgtggtcattttttgattgagggagatttaaatcctgataatagtgatgtggacaaactatttatccagttggtacaaacctacaatcaattatttgaagaaaaccctattaacgcaagtggagtagatgctaaagcgattctttctgcacgattgagtaaatcaagacgattagaaaatctcattgctcagctccccggtgagaagaaaaatggcttatttgggaatctcattgctttgtcattgggtttgacccctaattttaaatcaaattttgatttggcagaagatgctaaattacagctttcaaaagatacttacgatgatgatttagataatttattggcgcaaattggagatcaatatgctgatttgtttttggcagctaagaatttatcagatgctattttactttcagatatcctaagagtaaatactgaaataactaaggctcccctatcagcttcaatgattaaacgctacgatgaacatcatcaagacttgactcttttaaaagctttagttcgacaacaacttccagaaaagtataaagaaatcttttttgatcaatcaaaaaacggatatgcaggttatattgatgggggagctagccaagaagaattttataaatttatcaaaccaattttagaaaaaatggatggtactgaggaattattggtgaaactaaatcgtgaagatttgctgcgcaagcaacggacctttgacaacggctctattccccatcaaattcacttgggtgagctgcatgctattttgagaagacaagaagacttttatccatttttaaaagacaatcgtgagaagattgaaaaaatcttgacttttcgaattccttattatgttggtccattggcgcgtggcaatagtcgttttgcatggatgactcggaagtctgaagaaacaattaccccatggaattttgaagaagttgtcgataaaggtgcttcagctcaatcatttattgaacgcatgacaaactttgataaaaatcttccaaatgaaaaagtactaccaaaacatagtttgctttatgagtattttacggtttataacgaattgacaaaggtcaaatatgttactgaaggaatgcgaaaaccagcatttctttcaggtgaacagaagaaagccattgttgatttactcttcaaaacaaatcgaaaagtaaccgttaagcaattaaaagaagattatttcaaaaaaatagaatgttttgatagtgttgaaatttcaggagttgaagatagatttaatgcttcattaggtacctaccatgatttgctaaaaattattaaagataaagattttttggataatgaagaaaatgaagatatcttagaggatattgttttaacattgaccttatttgaagatagggagatgattgaggaaagacttaaaacatatgctcacctctttgatgataaggtgatgaaacagcttaaacgtcgccgttatactggttggggacgtttgtctcgaaaattgattaatggtattagggataagcaatctggcaaaacaatattagattttttgaaatcagatggttttgccaatcgcaattttatgcagctgatccatgatgatagtttgacatttaaagaagacattcaaaaagcacaagtgtctggacaaggcgatagtttacatgaacatattgcaaatttagctggtagccctgctattaaaaaaggtattttacagactgtaaaagttgttgatgaattggtcaaagtaatggggcggcataagccagaaaatatcgttattgaaatggcacgtgaaaatcagacaactcaaaagggccagaaaaattcgcgagagcgtatgaaacgaatcgaagaaggtatcaaagaattaggaagtcagattcttaaagagcatcctgttgaaaatactcaattgcaaaatgaaaagctctatctctattatctccaaaatggaagagacatgtatgtggaccaagaattagatattaatcgtttaagtgattatgatgtcgatcacattgttccacaaagtttccttaaagacgattcaatagacaataaggtcttaacgcgttctgataaaaatcgtggtaaatcggataacgttccaagtgaagaagtagtcaaaaagatgaaaaactattggagacaacttctaaacgccaagttaatcactcaacgtaagtttgataatttaacgaaagctgaacgtggaggtttgagtgaacttgataaagctggttttatcaaacgccaattggttgaaactcgccaaatcactaagcatgtggcacaaattttggatagtcgcatgaatactaaatacgatgaaaatgataaacttattcgagaggttaaagtgattaccttaaaatctaaattagtttctgacttccgaaaagatttccaattctataaagtacgtgagattaacaattaccatcatgcccatgatgcgtatctaaatgccgtcgttggaactgctttgattaagaaatatccaaaacttgaatcggagtttgtctatggtgattataaagtttatgatgttcgtaaaatgattgctaagtctgagcaagaaataggcaaagcaaccgcaaaatatttcttttactctaatatcatgaacttcttcaaaacagaaattacacttgcaaatggagagattcgcaaacgccctctaatcgaaactaatggggaaactggagaaattgtctgggataaagggcgagattttgccacagtgcgcaaagtattgtccatgccccaagtcaatattgtcaagaaaacagaagtacagacaggcggattctccaaggagtcaattttaccaaaaagaaattcggacaagcttattgctcgtaaaaaagactgggatccaaaaaaatatggtggttttgatagtccaacggtagcttattcagtcctagtggttgctaaggtggaaaaagggaaatcgaagaagttaaaatccgttaaagagttactagggatcacaattatggaaagaagttcctttgaaaaaaatccgattgactttttagaagctaaaggatataaggaagttaaaaaagacttaatcattaaactacctaaatatagtctttttgagttagaaaacggtcgtaaacggatgctggctagtgccggagaattacaaaaaggaaatgagctggctctgccaagcaaatatgtgaattttttatatttagctagtcattatgaaaagttgaagggtagtccagaagataacgaacaaaaacaattgtttgtggagcagcataagcattatttagatgagattattgagcaaatcagtgaattttctaagcgtgttattttagcagatgccaatttagataaagttcttagtgcatataacaaacatagagacaaaccaatacgtgaacaagcagaaaatattattcatttatttacgttgacgaatcttggagctcccgctgcttttaaatattttgatacaacaattgatcgtaaacgatatacgtctacaaaagaagttttagatgccactcttatccatcaatccatcactggtctttatgaaacacgcattgatttgagtcagctaggaggtgactga

SEQ ID NO: 203 - protein, 1368 aa, synthetic construct
  REGION 1..1368: note = catalytically inactive Cas9 (dCas9)polypeptide sequence
  REGION 5..58: note = MISC_FEATURE - RuvC domain
  REGION 718..764: note = MISC_FEATURE - RuvC domain
  REGION 773..902: note = MISC_FEATURE - HNH domain
  REGION 907..1102: note = MISC_FEATURE - RuvC domain
MDKKYSIGLAIGTNSVGWAVITDEYKVPSKKFKVLGNTDRHSIKKNLIGALLFDSGETAEATRLKRTARRRYTRRKNRICYLQEIFSNEMAKVDDSFFHRLEESFLVEEDKKHERHPIFGNIVDEVAYHEKYPTIYHLRKKLVDSTDKADLRLIYLALAHMIKFRGHFLIEGDLNPDNSDVDKLFIQLVQTYNQLFEENPINASGVDAKAILSARLSKSRRLENLIAQLPGEKKNGLFGNLIALSLGLTPNFKSNFDLAEDAKLQLSKDTYDDDLDNLLAQIGDQYADLFLAAKNLSDAILLSDILRVNTEITKAPLSASMIKRYDEHHQDLTLLKALVRQQLPEKYKEIFFDQSKNGYAGYIDGGASQEEFYKFIKPILEKMDGTEELLVKLNREDLLRKQRTFDNGSIPHQIHLGELHAILRRQEDFYPFLKDNREKIEKILTFRIPYYVGPLARGNSRFAWMTRKSEETITPWNFEEVVDKGASAQSFIERMTNFDKNLPNEKVLPKHSLLYEYFTVYNELTKVKYVTEGMRKPAFLSGEQKKAIVDLLFKTNRKVTVKQLKEDYFKKIECFDSVEISGVEDRFNASLGTYHDLLKIIKDKDFLDNEENEDILEDIVLTLTLFEDREMIEERLKTYAHLFDDKVMKQLKRRRYTGWGRLSRKLINGIRDKQSGKTILDFLKSDGFANRNFMQLIHDDSLTFKEDIQKAQVSGQGDSLHEHIANLAGSPAIKKGILQTVKVVDELVKVMGRHKPENIVIEMARENQTTQKGQKNSRERMKRIEEGIKELGSQILKEHPVENTQLQNEKLYLYYLQNGRDMYVDQELDINRLSDYDVDAIVPQSFLKDDSIDNKVLTRSDKNRGKSDNVPSEEVVKKMKNYWRQLLNAKLITQRKFDNLTKAERGGLSELDKAGFIKRQLVETRQITKHVAQILDSRMNTKYDENDKLIREVKVITLKSKLVSDFRKDFQFYKVREINNYHHAHDAYLNAVVGTALIKKYPKLESEFVYGDYKVYDVRKMIAKSEQEIGKATAKYFFYSNIMNFFKTEITLANGEIRKRPLIETNGETGEIVWDKGRDFATVRKVLSMPQVNIVKKTEVQTGGFSKESILPKRNSDKLIARKKDWDPKKYGGFDSPTVAYSVLVVAKVEKGKSKKLKSVKELLGITIMERSSFEKNPIDFLEAKGYKEVKKDLIIKLPKYSLFELENGRKRMLASAGELQKGNELALPSKYVNFLYLASHYEKLKGSPEDNEQKQLFVEQHKHYLDEIIEQISEFSKRVILADANLDKVLSAYNKHRDKPIREQAENIIHLFTLTNLGAPAAFKYFDTTIDRKRYTSTKEVLDATLIHQSITGLYETRIDLSQLGGD

SEQ ID NO: 204 - protein, 345 aa, Sulfolobus islandicus
  REGION 1..345: note = MISC_FEATURE - tr|F0NN87|F0NN87_SULIHCRISPR-associatedCasx protein OS =Sulfolobus islandicus (strain HVE10/4) GN = SiH_0402 PE=4; SV = 1);CasX polypeptide sequence
MEVPLYNIFGDNYIIQVATEAENSTIYNNKVEIDDEELRNVLNLAYKIAKNNEDAAAERRGKAKKKKGEEGETTTSNIILPLSGNDKNPWTETLKCYNFPTTVALSEVFKNFSQVKECEEVSAPSFVKPEFYEFGRSPGMVERTRRVKLEVEPHYLIIAAAGWVLTRLGKAKVSEGDYVGVNVFTPTRGILYSLIQNVNGIVPGIKPETAFGLWIARKVVSSVTNPNVSVVRIYTISDAVGQNPTTINGGFSIDLTKLLEKRYLLSERLEAIARNALSISSNMRERYIVLANYIYEYLTGSKRLEDLLYFANRDLIMNLNSDDGKVRDLKLISAYVNGELIRGEG

SEQ ID NO: 205 - protein, 345 aa, Sulfolobus islandicus
  REGION 1..345: note = MISC_FEATURE - tr|F0NH53|F0NH53_SULIR CRISPR associated protein, Casx OS =Sulfolobus islandicus (strain REY15A) GN=SiRe_0771 PE=4 SV=1);CasX polypeptide sequence
MEVPLYNIFGDNYIIQVATEAENSTIYNNKVEIDDEELRNVLNLAYKIAKNNEDAAAERRGKAKKKKGEEGETTTSNIILPLSGNDKNPWTETLKCYNFPTTVALSEVFKNFSQVKECEEVSAPSFVKPEFYKFGRSPGMVERTRRVKLEVEPHYLIMAAAGWVLTRLGKAKVSEGDYVGVNVFTPTRGILYSLIQNVNGIVPGIKPETAFGLWIARKVVSSVTNPNVSVVSIYTISDAVGQNPTTINGGFSIDLTKLLEKRDLLSERLEAIARNALSISSNMRERYIVLANYIYEYLTGSKRLEDLLYFANRDLIMNLNSDDGKVRDLKLISAYVNGELIRGEG

SEQ ID NO: 206 - protein, 987 aa, unidentified
  REGION 1..987: note = MISC_FEATURE - CasX polypeptide sequence
MEKRINKIRKKLSADNATKPVSRSGPMKTLLVRVMTDDLKKRLEKRRKKPEVMPQVISNNAANNLRMLLDDYTKMKEAILQVYWQEFKDDHVGLMCKFAQPASKKIDQNKLKPEMDEKGNLTTAGFACSQCGQPLFVYKLEQVSEKGKAYTNYFGRCNVAEHEKLILLAQLKPVKDSDEAVTYSLGKFGQRALDFYSIHVTKESTHPVKPLAQIAGNRYASGPVGKALSDACMGTIASFLSKYQDIIIEHQKVVKGNQKRLESLRELAGKENLEYPSVTLPPQPHTKEGVDFAYNEVIARVRMWVNLNLWQKLKLSRDDAKPLLRLKGFPSFPVVERRENEVDWWNTINEVKKLIDAKRDMGRVFWSGVTAEKRNTILEGYNYLPNENDHKKREGSLENPKKPAKRQFGDLLLYLEKKYAGDWGKVFDEAWERIDKKIAGLTSHIEREEARNAEDAQSKAVLTDWLRAKASFVLERLKEMDEKEFYACEIQLQKWYGDLRGNPFAVEAENRVVDISGFSIGSDGHSIQYRNLLAWKYLENGKREFYLLMNYGKKGRIRFTDGTDIKKSGKWQGLLYGGGKAKVIDLTFDPDDEQLIILPLAFGTRQGREFIWNDLLSLETGLIKLANGRVIEKTIYNKKIGRDEPALFVALTFERREVVDPSNIKPVNLIGVARGENIPAVIALTDPEGCPLPEFKDSSGGPTDILRIGEGYKEKQRAIQAAKEVEQRRAGGYSRKFASKSRNLADDMVRNSARDLFYHAVTHDAVLVFANLSRGFGRQGKRTFMTERQYTKMEDWLTAKLAYEGLTSKTYLSKTLAQYTSKTCSNCGFTITYADMDVMLVRLKKTSDGWATTLNNKELKAEYQITYYNRYKRQTVEKELSAELDRLSEESGNNDISKWTKGRRDEALFLLKKRFSHRPVQEQFVCLDCGHEVHAAEQAALNIARSWLFLNSNSTEFKSYKSGKQPFVGAWQAFYKRRLKEVWKPNA

SEQ ID NO: 207 - protein, 1210 aa, unidentified
  REGION 1..1210: note = MISC_FEATURE - APG80656.1 CRISPR-associated protein CasY [uncultured Parcubacteria group bacterium]; CasY polypeptide sequence
MSKRHPRISGVKGYRLHAQRLEYTGKSGAMRTIKYPLYSSPSGGRTVPREIVSAINDDYVGLYGLSNFDDLYNAEKRNEEKVYSVLDFWYDCVQYGAVFSYTAPGLLKNVAEVRGGSYELTKTLKGSHLYDELQIDKVIKFLNKKEISRANGSLDKLKKDIIDCFKAEYRERHKDQCNKLADDIKNAKKDAGASLGERQKKLFRDFFGISEQSENDKPSFTNPLNLTCCLLPFDTVNNNRNRGEVLFNKLKEYAQKLDKNEGSLEMWEYIGIGNSGTAFSNFLGEGFLGRLRENKITELKKAMMDITDAWRGQEQEEELEKRLRILAALTIKLREPKFDNHWGGYRSDINGKLSSWLQNYINQTVKIKEDLKGHKKDLKKAKEMINRFGESDTKEEAVVSSLLESIEKIVPDDSADDEKPDIPAIAIYRRFLSDGRLTLNRFVQREDVQEALIKERLEAEKKKKPKKRKKKSDAEDEKETIDFKELFPHLAKPLKLVPNFYGDSKRELYKKYKNAAIYTDALWKAVEKIYKSAFSSSLKNSFFDTDFDKDFFIKRLQKIFSVYRRFNTDKWKPIVKNSFAPYCDIVSLAENEVLYKPKQSRSRKSAAIDKNRVRLPSTENIAKAGIALARELSVAGFDWKDLLKKEEHEEYIDLIELHKTALALLLAVTETQLDISALDFVENGTVKDFMKTRDGNLVLEGRFLEMFSQSIVFSELRGLAGLMSRKEFITRSAIQTMNGKQAELLYIPHEFQSAKITTPKEMSRAFLDLAPAEFATSLEPESLSEKSLLKLKQMRYYPHYFGYELTRTGQGIDGGVAENALRLEKSPVKKREIKCKQYKTLGRGQNKIVLYVRSSYYQTQFLEWFLHRPKNVQTDVAVSGSFLIDEKKVKTRWNYDALTVALEPVSGSERVFVSQPFTIFPEKSAEEEGQRYLGIDIGEYGIAYTALEITGDSAKILDQNFISDPQLKTLREEVKGLKLDQRRGTFAMPSTKIARIRESLVHSLRNRIHHLALKHKAKIVYELEVSRFEEGKQKIKKVYATLKKADVYSEIDADKNLQTTVWGKLAVASEISASYTSQFCGACKKLWRAEMQVDETITTQELIGTVRVIKGGTLIDAIKDFMRPPIFDENDTPFPKYRDFCDKHHISKKMRGNSCLFICPFCRANADADIQASQTIALLRYVKEEKKVEDYFERFRKLKNIKVLGQMKKI

SEQ ID NO: 208 - protein, 1082 aa, Neisseria meningitidis
  REGION 1..1082: note = MISC_FEATURE - NCBI Reference: WP_002235162.1; type II CRISPR RNA-guided endonuclease Cas9; Nme1Cas9 polypeptide sequence
MAAFKPNPINYILGLDIGIASVGWAMVEIDEDENPICLIDLGVRVFERAEVPKTGDSLAMARRLARSVRRLTRRRAHRLLRARRLLKREGVLQAADFDENGLIKSLPNTPWQLRAAALDRKLTPLEWSAVLLHLIKHRGYLSQRKNEGETADKELGALLKGVADNAHALQTGDFRTPAELALNKFEKESGHIRNQRGDYSHTFSRKDLQAELILLFEKQKEFGNPHVSGGLKEGIETLLMTQRPALSGDAVQKMLGHCTFEPAEPKAAKNTYTAERFIWLTKLNNLRILEQGSERPLTDTERATLMDEPYRKSKLTYAQARKLLGLEDTAFFKGLRYGKDNAEASTLMEMKAYHAISRALEKEGLKDKKSPLNLSPELQDEIGTAFSLFKTDEDITGRLKDRIQPEILEALLKHISFDKFVQISLKALRRIVPLMEQGKRYDEACAEIYGDHYGKKNTEEKIYLPPIPADEIRNPVVLRALSQARKVINGVVRRYGSPARIHIETAREVGKSFKDRKEIEKRQEENRKDREKAAAKFREYFPNFVGEPKSKDILKLRLYEQQHGKCLYSGKEINLGRLNEKGYVEIDHALPFSRTWDDSFNNKVLVLGSENQNKGNQTPYEYFNGKDNSREWQEFKARVETSRFPRSKKQRILLQKFDEDGFKERNLNDTRYVNRFLCQFVADRMRLTGKGKKRVFASNGQITNLLRGFWGLRKVRAENDRHHALDAVVVACSTVAMQQKITRFVRYKEMNAFDGKTIDKETGEVLHQKTHFPQPWEFFAQEVMIRVFGKPDGKPEFEEADTPEKLRTLLAEKLSSRPEAVHEYVTPLFVSRAPNRKMSGQGHMETVKSAKRLDEGVSVLRVPLTQLKLKDLEKMVNREREPKLYEALKARLEAHKDDPAKAFAEPFYKYDKAGNRTQQVKAVRVEQVQKTGVWVRNHNGIADNATMVRVDVFEKGDKYYLVPIYSWQVAKGILPDRAVVQGKDEEDWQLIDDSFNFKFSLHPNDLVEVITKKARMFGYFASCHRGTGNINIRIHDLDHKIGKNGILEGIGVKTALSFQKYQIDELGKEIRPCRLKKRPPVR

SEQ ID NO: 209 - protein, 1082 aa, Neisseria meningitidis
  REGION 1..1082: note = MISC_FEATURE - NCBI Reference: WP_002230835; type II CRISPR RNA-guided endonuclease Cas9; Nme2Cas9 polypeptide sequence
MAAFKPNPINYILGLDIGIASVGWAMVEIDEEENPIRLIDLGVRVFERAEVPKTGDSLAMARRLARSVRRLTRRRAHRLLRARRLLKREGVLQAADFDENGLIKSLPNTPWQLRAAALDRKLTPLEWSAVLLHLIKHRGYLSQRKNEGETADKELGALLKGVANNAHALQTGDFRTPAELALNKFEKESGHIRNQRGDYSHTFSRKDLQAELILLFEKQKEFGNPHVSGGLKEGIETLLMTQRPALSGDAVQKMLGHCTFEPAEPKAAKNTYTAERFIWLTKLNNLRILEQGSERPLTDTERATLMDEPYRKSKLTYAQARKLLGLEDTAFFKGLRYGKDNAEASTLMEMKAYHAISRALEKEGLKDKKSPLNLSSELQDEIGTAFSLFKTDEDITGRLKDRVQPEILEALLKHISFDKFVQISLKALRRIVPLMEQGKRYDEACAEIYGDHYGKKNTEEKIYLPPIPADEIRNPVVLRALSQARKVINGVVRRYGSPARIHIETAREVGKSFKDRKEIEKRQEENRKDREKAAAKFREYFPNFVGEPKSKDILKLRLYEQQHGKCLYSGKEINLVRLNEKGYVEIDHALPFSRTWDDSFNNKVLVLGSENQNKGNQTPYEYFNGKDNSREWQEFKARVETSRFPRSKKQRILLQKFDEDGFKECNLNDTRYVNRFLCQFVADHILLTGKGKRRVFASNGQITNLLRGFWGLRKVRAENDRHHALDAVVVACSTVAMQQKITRFVRYKEMNAFDGKTIDKETGKVLHQKTHFPQPWEFFAQEVMIRVFGKPDGKPEFEEADTPEKLRTLLAEKLSSRPEAVHEYVTPLFVSRAPNRKMSGAHKDTLRSAKRFVKHNEKISVKRVWLTEIKLADLENMVNYKNGREIELYEALKARLEAYGGNAKQAFDPKDNPFYKKGGQLVKAVRVEKTQESGVLLNKKNAYTIADNGDMVRVDVFCKVDKKGKNQYFIVPIYAWQVAENILPDIDCKGYRIDDSYTFCFSLHKYDLIAFQKDEKSKVEFAYYINCDSSNGRFYLAWHDKGSKEQQFRISTQNLVLIQKYQVNELGKEIRPCRLKKRPPVR

SEQ ID NO: 210 - protein, 1300 aa, Francisella tularensis
  REGION 1..1300: note = MISC_FEATURE - wild type Cpf1 polypeptide sequence
  source 1..1300: note = subspecies novicida
MSIYQEFVNKYSLSKTLRFELIPQGKTLENIKARGLILDDEKRAKDYKKAKQIIDKYHQFFIEEILSSVCISEDLLQNYSDVYFKLKKSDDDNLQKDFKSAKDTIKKQISEYIKDSEKFKNLFNQNLIDAKKGQESDLILWLKQSKDNGIELFKANSDITDIDEALEIIKSFKGWTTYFKGFHENRKNVYSSNDIPTSIIYRIVDDNLPKFLENKAKYESLKDKAPEAINYEQIKKDLAEELTFDIDYKTSEVNQRVFSLDEVFEIANFNNYLNQSGITKFNTIIGGKFVNGENTKRKGINEYINLYSQQINDKTLKKYKMSVLFKQILSDTESKSFVIDKLEDDSDVVTTMQSFYEQIAAFKTVEEKSIKETLSLLFDDLKAQKLDLSKIYFKNDKSLTDLSQQVFDDYSVIGTAVLEYITQQIAPKNLDNPSKKEQELIAKKTEKAKYLSLETIKLALEEFNKHRDIDKQCRFEEILANFAAIPMIFDEIAQNKDNLAQISIKYQNQGKKDLLQASAEDDVKAIKDLLDQTNNLLHKLKIFHISQSEDKANILDKDEHFYLVFEECYFELANIVPLYNKIRNYITQKPYSDEKFKLNFENSTLANGWDKNKEPDNTAILFIKDDKYYLGVMNKKNNKIFDDKAIKENKGEGYKKIVYKLLPGANKMLPKVFFSAKSIKFYNPSEDILRIRNHSTHTKNGSPQKGYEKFEFNIEDCRKFIDFYKQSISKHPEWKDFGFRFSDTQRYNSIDEFYREVENQGYKLTFENISESYIDSVVNQGKLYLFQIYNKDFSAYSKGRPNLHTLYWKALFDERNLQDVVYKLNGEAELFYRKQSIPKKITHPAKEAIANKNKDNPKKESVFEYDLIKDKRFTEDKFFFHCPITINFKSSGANKFNDEINLLLKEKANDVHILSIDRGERHLAYYTLVDGKGNIIKQDTFNIIGNDRMKTNYHDKLAAIEKDRDSARKDWKKINNIKEMKEGYLSQVVHEIAKLVIEYNAIVVFEDLNFGFKRGRFKVEKQVYQKLEKMLIEKLNYLVFKDNEFDKTGGVLRAYQLTAPFETFKKMGKQTGIIYYVPAGFTSKICPVTGFVNQLYPKYESVSKSQEFFSKFDKICYNLDKGYFEFSFDYKNFGDKAAKGKWTIASFGSRLINFRNSDKNHNWDTREVYPTKELEKLLKDYSIEYGHGECIKAAICGESDKKFFAKLTSVLNTILQMRNSKTGTELDYLISPVADVNGNFFDSRQAPKNMPQDADANGAYHIGLKGLMLLGRIKNNQEGKKLNLVIKNEEYFEFVQNRNN

SEQ ID NO: 211 - protein, 1300 aa, Francisella tularensis
  REGION 1..1300: note = MISC_FEATURE - Cpf1 D917A polypeptide sequence
  source 1..1300: note = subspecies novicida
MSIYQEFVNKYSLSKTLRFELIPQGKTLENIKARGLILDDEKRAKDYKKAKQIIDKYHQFFIEEILSSVCISEDLLQNYSDVYFKLKKSDDDNLQKDFKSAKDTIKKQISEYIKDSEKFKNLFNQNLIDAKKGQESDLILWLKQSKDNGIELFKANSDITDIDEALEIIKSFKGWTTYFKGFHENRKNVYSSNDIPTSIIYRIVDDNLPKFLENKAKYESLKDKAPEAINYEQIKKDLAEELTFDIDYKTSEVNQRVFSLDEVFEIANFNNYLNQSGITKFNTIIGGKFVNGENTKRKGINEYINLYSQQINDKTLKKYKMSVLFKQILSDTESKSFVIDKLEDDSDVVTTMQSFYEQIAAFKTVEEKSIKETLSLLFDDLKAQKLDLSKIYFKNDKSLTDLSQQVFDDYSVIGTAVLEYITQQIAPKNLDNPSKKEQELIAKKTEKAKYLSLETIKLALEEFNKHRDIDKQCRFEEILANFAAIPMIFDEIAQNKDNLAQISIKYQNQGKKDLLQASAEDDVKAIKDLLDQTNNLLHKLKIFHISQSEDKANILDKDEHFYLVFEECYFELANIVPLYNKIRNYITQKPYSDEKFKLNFENSTLANGWDKNKEPDNTAILFIKDDKYYLGVMNKKNNKIFDDKAIKENKGEGYKKIVYKLLPGANKMLPKVFFSAKSIKFYNPSEDILRIRNHSTHTKNGSPQKGYEKFEFNIEDCRKFIDFYKQSISKHPEWKDFGFRFSDTQRYNSIDEFYREVENQGYKLTFENISESYIDSVVNQGKLYLFQIYNKDFSAYSKGRPNLHTLYWKALFDERNLQDVVYKLNGEAELFYRKQSIPKKITHPAKEAIANKNKDNPKKESVFEYDLIKDKRFTEDKFFFHCPITINFKSSGANKFNDEINLLLKEKANDVHILSIARGERHLAYYTLVDGKGNIIKQDTFNIIGNDRMKTNYHDKLAAIEKDRDSARKDWKKINNIKEMKEGYLSQVVHEIAKLVIEYNAIVVFEDLNFGFKRGRFKVEKQVYQKLEKMLIEKLNYLVFKDNEFDKTGGVLRAYQLTAPFETFKKMGKQTGIIYYVPAGFTSKICPVTGFVNQLYPKYESVSKSQEFFSKFDKICYNLDKGYFEFSFDYKNFGDKAAKGKWTIASFGSRLINFRNSDKNHNWDTREVYPTKELEKLLKDYSIEYGHGECIKAAICGESDKKFFAKLTSVLNTILQMRNSKTGTELDYLISPVADVNGNFFDSRQAPKNMPQDADANGAYHIGLKGLMLLGRIKNNQEGKKLNLVIKNEEYFEFVQNRNN

SEQ ID NO: 212 - protein, 1300 aa, Francisella tularensis
  REGION 1..1300: note = MISC_FEATURE - Cpf1 E1006A polypeptide sequence
  source 1..1300: note = subspecies novicida
MSIYQEFVNKYSLSKTLRFELIPQGKTLENIKARGLILDDEKRAKDYKKAKQIIDKYHQFFIEEILSSVCISEDLLQNYSDVYFKLKKSDDDNLQKDFKSAKDTIKKQISEYIKDSEKFKNLFNQNLIDAKKGQESDLILWLKQSKDNGIELFKANSDITDIDEALEIIKSFKGWTTYFKGFHENRKNVYSSNDIPTSIIYRIVDDNLPKFLENKAKYESLKDKAPEAINYEQIKKDLAEELTFDIDYKTSEVNQRVFSLDEVFEIANFNNYLNQSGITKFNTIIGGKFVNGENTKRKGINEYINLYSQQINDKTLKKYKMSVLFKQILSDTESKSFVIDKLEDDSDVVTTMQSFYEQIAAFKTVEEKSIKETLSLLFDDLKAQKLDLSKIYFKNDKSLTDLSQQVFDDYSVIGTAVLEYITQQIAPKNLDNPSKKEQELIAKKTEKAKYLSLETIKLALEEFNKHRDIDKQCRFEEILANFAAIPMIFDEIAQNKDNLAQISIKYQNQGKKDLLQASAEDDVKAIKDLLDQTNNLLHKLKIFHISQSEDKANILDKDEHFYLVFEECYFELANIVPLYNKIRNYITQKPYSDEKFKLNFENSTLANGWDKNKEPDNTAILFIKDDKYYLGVMNKKNNKIFDDKAIKENKGEGYKKIVYKLLPGANKMLPKVFFSAKSIKFYNPSEDILRIRNHSTHTKNGSPQKGYEKFEFNIEDCRKFIDFYKQSISKHPEWKDFGFRFSDTQRYNSIDEFYREVENQGYKLTFENISESYIDSVVNQGKLYLFQIYNKDFSAYSKGRPNLHTLYWKALFDERNLQDVVYKLNGEAELFYRKQSIPKKITHPAKEAIANKNKDNPKKESVFEYDLIKDKRFTEDKFFFHCPITINFKSSGANKFNDEINLLLKEKANDVHILSIDRGERHLAYYTLVDGKGNIIKQDTFNIIGNDRMKTNYHDKLAAIEKDRDSARKDWKKINNIKEMKEGYLSQVVHEIAKLVIEYNAIVVFADLNFGFKRGRFKVEKQVYQKLEKMLIEKLNYLVFKDNEFDKTGGVLRAYQLTAPFETFKKMGKQTGIIYYVPAGFTSKICPVTGFVNQLYPKYESVSKSQEFFSKFDKICYNLDKGYFEFSFDYKNFGDKAAKGKWTIASFGSRLINFRNSDKNHNWDTREVYPTKELEKLLKDYSIEYGHGECIKAAICGESDKKFFAKLTSVLNTILQMRNSKTGTELDYLISPVADVNGNFFDSRQAPKNMPQDADANGAYHIGLKGLMLLGRIKNNQEGKKLNLVIKNEEYFEFVQNRNN

SEQ ID NO: 213 - protein, 1300 aa, Francisella tularensis
  REGION 1..1300: note = MISC_FEATURE - Cpf1 D1255A polypeptide sequence
  source 1..1300: note = subspecies novicida
MSIYQEFVNKYSLSKTLRFELIPQGKTLENIKARGLILDDEKRAKDYKKAKQIIDKYHQFFIEEILSSVCISEDLLQNYSDVYFKLKKSDDDNLQKDFKSAKDTIKKQISEYIKDSEKFKNLFNQNLIDAKKGQESDLILWLKQSKDNGIELFKANSDITDIDEALEIIKSFKGWTTYFKGFHENRKNVYSSNDIPTSIIYRIVDDNLPKFLENKAKYESLKDKAPEAINYEQIKKDLAEELTFDIDYKTSEVNQRVFSLDEVFEIANFNNYLNQSGITKFNTIIGGKFVNGENTKRKGINEYINLYSQQINDKTLKKYKMSVLFKQILSDTESKSFVIDKLEDDSDVVTTMQSFYEQIAAFKTVEEKSIKETLSLLFDDLKAQKLDLSKIYFKNDKSLTDLSQQVFDDYSVIGTAVLEYITQQIAPKNLDNPSKKEQELIAKKTEKAKYLSLETIKLALEEFNKHRDIDKQCRFEEILANFAAIPMIFDEIAQNKDNLAQISIKYQNQGKKDLLQASAEDDVKAIKDLLDQTNNLLHKLKIFHISQSEDKANILDKDEHFYLVFEECYFELANIVPLYNKIRNYITQKPYSDEKFKLNFENSTLANGWDKNKEPDNTAILFIKDDKYYLGVMNKKNNKIFDDKAIKENKGEGYKKIVYKLLPGANKMLPKVFFSAKSIKFYNPSEDILRIRNHSTHTKNGSPQKGYEKFEFNIEDCRKFIDFYKQSISKHPEWKDFGFRFSDTQRYNSIDEFYREVENQGYKLTFENISESYIDSVVNQGKLYLFQIYNKDFSAYSKGRPNLHTLYWKALFDERNLQDVVYKLNGEAELFYRKQSIPKKITHPAKEAIANKNKDNPKKESVFEYDLIKDKRFTEDKFFFHCPITINFKSSGANKFNDEINLLLKEKANDVHILSIDRGERHLAYYTLVDGKGNIIKQDTFNIIGNDRMKTNYHDKLAAIEKDRDSARKDWKKINNIKEMKEGYLSQVVHEIAKLVIEYNAIVVFEDLNFGFKRGRFKVEKQVYQKLEKMLIEKLNYLVFKDNEFDKTGGVLRAYQLTAPFETFKKMGKQTGIIYYVPAGFTSKICPVTGFVNQLYPKYESVSKSQEFFSKFDKICYNLDKGYFEFSFDYKNFGDKAAKGKWTIASFGSRLINFRNSDKNHNWDTREVYPTKELEKLLKDYSIEYGHGECIKAAICGESDKKFFAKLTSVLNTILQMRNSKTGTELDYLISPVADVNGNFFDSRQAPKNMPQDAAANGAYHIGLKGLMLLGRIKNNQEGKKLNLVIKNEEYFEFVQNRNN

SEQ ID NO: 214 - protein, 1300 aa, Francisella tularensis
  REGION 1..1300: note = MISC_FEATURE - Cpf1 D917A/E1006A polypeptide sequence
  source 1..1300: note = subspecies novicida
MSIYQEFVNKYSLSKTLRFELIPQGKTLENIKARGLILDDEKRAKDYKKAKQIIDKYHQFFIEEILSSVCISEDLLQNYSDVYFKLKKSDDDNLQKDFKSAKDTIKKQISEYIKDSEKFKNLFNQNLIDAKKGQESDLILWLKQSKDNGIELFKANSDITDIDEALEIIKSFKGWTTYFKGFHENRKNVYSSNDIPTSIIYRIVDDNLPKFLENKAKYESLKDKAPEAINYEQIKKDLAEELTFDIDYKTSEVNQRVFSLDEVFEIANFNNYLNQSGITKFNTIIGGKFVNGENTKRKGINEYINLYSQQINDKTLKKYKMSVLFKQILSDTESKSFVIDKLEDDSDVVTTMQSFYEQIAAFKTVEEKSIKETLSLLFDDLKAQKLDLSKIYFKNDKSLTDLSQQVFDDYSVIGTAVLEYITQQIAPKNLDNPSKKEQELIAKKTEKAKYLSLETIKLALEEFNKHRDIDKQCRFEEILANFAAIPMIFDEIAQNKDNLAQISIKYQNQGKKDLLQASAEDDVKAIKDLLDQTNNLLHKLKIFHISQSEDKANILDKDEHFYLVFEECYFELANIVPLYNKIRNYITQKPYSDEKFKLNFENSTLANGWDKNKEPDNTAILFIKDDKYYLGVMNKKNNKIFDDKAIKENKGEGYKKIVYKLLPGANKMLPKVFFSAKSIKFYNPSEDILRIRNHSTHTKNGSPQKGYEKFEFNIEDCRKFIDFYKQSISKHPEWKDFGFRFSDTQRYNSIDEFYREVENQGYKLTFENISESYIDSVVNQGKLYLFQIYNKDFSAYSKGRPNLHTLYWKALFDERNLQDVVYKLNGEAELFYRKQSIPKKITHPAKEAIANKNKDNPKKESVFEYDLIKDKRFTEDKFFFHCPITINFKSSGANKFNDEINLLLKEKANDVHILSIARGERHLAYYTLVDGKGNIIKQDTFNIIGNDRMKTNYHDKLAAIEKDRDSARKDWKKINNIKEMKEGYLSQVVHEIAKLVIEYNAIVVFADLNFGFKRGRFKVEKQVYQKLEKMLIEKLNYLVFKDNEFDKTGGVLRAYQLTAPFETFKKMGKQTGIIYYVPAGFTSKICPVTGFVNQLYPKYESVSKSQEFFSKFDKICYNLDKGYFEFSFDYKNFGDKAAKGKWTIASFGSRLINFRNSDKNHNWDTREVYPTKELEKLLKDYSIEYGHGECIKAAICGESDKKFFAKLTSVLNTILQMRNSKTGTELDYLISPVADVNGNFFDSRQAPKNMPQDADANGAYHIGLKGLMLLGRIKNNQEGKKLNLVIKNEEYFEFVQNRNN

SEQ ID NO: 215 - protein, 1300 aa, Francisella tularensis
  REGION 1..1300: note = MISC_FEATURE - Cpf1 D917A/D1255A polypeptide sequence
  source 1..1300: note = subspecies novicida
MSIYQEFVNKYSLSKTLRFELIPQGKTLENIKARGLILDDEKRAKDYKKAKQIIDKYHQFFIEEILSSVCISEDLLQNYSDVYFKLKKSDDDNLQKDFKSAKDTIKKQISEYIKDSEKFKNLFNQNLIDAKKGQESDLILWLKQSKDNGIELFKANSDITDIDEALEIIKSFKGWTTYFKGFHENRKNVYSSNDIPTSIIYRIVDDNLPKFLENKAKYESLKDKAPEAINYEQIKKDLAEELTFDIDYKTSEVNQRVFSLDEVFEIANFNNYLNQSGITKFNTIIGGKFVNGENTKRKGINEYINLYSQQINDKTLKKYKMSVLFKQILSDTESKSFVIDKLEDDSDVVTTMQSFYEQIAAFKTVEEKSIKETLSLLFDDLKAQKLDLSKIYFKNDKSLTDLSQQVFDDYSVIGTAVLEYITQQIAPKNLDNPSKKEQELIAKKTEKAKYLSLETIKLALEEFNKHRDIDKQCRFEEILANFAAIPMIFDEIAQNKDNLAQISIKYQNQGKKDLLQASAEDDVKAIKDLLDQTNNLLHKLKIFHISQSEDKANILDKDEHFYLVFEECYFELANIVPLYNKIRNYITQKPYSDEKFKLNFENSTLANGWDKNKEPDNTAILFIKDDKYYLGVMNKKNNKIFDDKAIKENKGEGYKKIVYKLLPGANKMLPKVFFSAKSIKFYNPSEDILRIRNHSTHTKNGSPQKGYEKFEFNIEDCRKFIDFYKQSISKHPEWKDFGFRFSDTQRYNSIDEFYREVENQGYKLTFENISESYIDSVVNQGKLYLFQIYNKDFSAYSKGRPNLHTLYWKALFDERNLQDVVYKLNGEAELFYRKQSIPKKITHPAKEAIANKNKDNPKKESVFEYDLIKDKRFTEDKFFFHCPITINFKSSGANKFNDEINLLLKEKANDVHILSIARGERHLAYYTLVDGKGNIIKQDTFNIIGNDRMKTNYHDKLAAIEKDRDSARKDWKKINNIKEMKEGYLSQVVHEIAKLVIEYNAIVVFEDLNFGFKRGRFKVEKQVYQKLEKMLIEKLNYLVFKDNEFDKTGGVLRAYQLTAPFETFKKMGKQTGIIYYVPAGFTSKICPVTGFVNQLYPKYESVSKSQEFFSKFDKICYNLDKGYFEFSFDYKNFGDKAAKGKWTIASFGSRLINFRNSDKNHNWDTREVYPTKELEKLLKDYSIEYGHGECIKAAICGESDKKFFAKLTSVLNTILQMRNSKTGTELDYLISPVADVNGNFFDSRQAPKNMPQDAAANGAYHIGLKGLMLLGRIKNNQEGKKLNLVIKNEEYFEFVQNRNN

SEQ ID NO: 216 - protein, 1300 aa, Francisella tularensis
  REGION 1..1300: note = MISC_FEATURE - Cpf1 E1006A/D1255A polypeptide sequence
  source 1..1300: note = subspecies novicida
MSIYQEFVNKYSLSKTLRFELIPQGKTLENIKARGLILDDEKRAKDYKKAKQIIDKYHQFFIEEILSSVCISEDLLQNYSDVYFKLKKSDDDNLQKDFKSAKDTIKKQISEYIKDSEKFKNLFNQNLIDAKKGQESDLILWLKQSKDNGIELFKANSDITDIDEALEIIKSFKGWTTYFKGFHENRKNVYSSNDIPTSIIYRIVDDNLPKFLENKAKYESLKDKAPEAINYEQIKKDLAEELTFDIDYKTSEVNQRVFSLDEVFEIANFNNYLNQSGITKFNTIIGGKFVNGENTKRKGINEYINLYSQQINDKTLKKYKMSVLFKQILSDTESKSFVIDKLEDDSDVVTTMQSFYEQIAAFKTVEEKSIKETLSLLFDDLKAQKLDLSKIYFKNDKSLTDLSQQVFDDYSVIGTAVLEYITQQIAPKNLDNPSKKEQELIAKKTEKAKYLSLETIKLALEEFNKHRDIDKQCRFEEILANFAAIPMIFDEIAQNKDNLAQISIKYQNQGKKDLLQASAEDDVKAIKDLLDQTNNLLHKLKIFHISQSEDKANILDKDEHFYLVFEECYFELANIVPLYNKIRNYITQKPYSDEKFKLNFENSTLANGWDKNKEPDNTAILFIKDDKYYLGVMNKKNNKIFDDKAIKENKGEGYKKIVYKLLPGANKMLPKVFFSAKSIKFYNPSEDILRIRNHSTHTKNGSPQKGYEKFEFNIEDCRKFIDFYKQSISKHPEWKDFGFRFSDTQRYNSIDEFYREVENQGYKLTFENISESYIDSVVNQGKLYLFQIYNKDFSAYSKGRPNLHTLYWKALFDERNLQDVVYKLNGEAELFYRKQSIPKKITHPAKEAIANKNKDNPKKESVFEYDLIKDKRFTEDKFFFHCPITINFKSSGANKFNDEINLLLKEKANDVHILSIDRGERHLAYYTLVDGKGNIIKQDTFNIIGNDRMKTNYHDKLAAIEKDRDSARKDWKKINNIKEMKEGYLSQVVHEIAKLVIEYNAIVVFADLNFGFKRGRFKVEKQVYQKLEKMLIEKLNYLVFKDNEFDKTGGVLRAYQLTAPFETFKKMGKQTGIIYYVPAGFTSKICPVTGFVNQLYPKYESVSKSQEFFSKFDKICYNLDKGYFEFSFDYKNFGDKAAKGKWTIASFGSRLINFRNSDKNHNWDTREVYPTKELEKLLKDYSIEYGHGECIKAAICGESDKKFFAKLTSVLNTILQMRNSKTGTELDYLISPVADVNGNFFDSRQAPKNMPQDAAANGAYHIGLKGLMLLGRIKNNQEGKKLNLVIKNEEYFEFVQNRNN

SEQ ID NO: 217 - protein, 1300 aa, Francisella tularensis
  REGION 1..1300: note = MISC_FEATURE - Cpf1 D917A/E1006A/D1255A polypeptide sequence
  source 1..1300: note = subspecies novicida
MSIYQEFVNKYSLSKTLRFELIPQGKTLENIKARGLILDDEKRAKDYKKAKQIIDKYHQFFIEEILSSVCISEDLLQNYSDVYFKLKKSDDDNLQKDFKSAKDTIKKQISEYIKDSEKFKNLFNQNLIDAKKGQESDLILWLKQSKDNGIELFKANSDITDIDEALEIIKSFKGWTTYFKGFHENRKNVYSSNDIPTSIIYRIVDDNLPKFLENKAKYESLKDKAPEAINYEQIKKDLAEELTFDIDYKTSEVNQRVFSLDEVFEIANFNNYLNQSGITKFNTIIGGKFVNGENTKRKGINEYINLYSQQINDKTLKKYKMSVLFKQILSDTESKSFVIDKLEDDSDVVTTMQSFYEQIAAFKTVEEKSIKETLSLLFDDLKAQKLDLSKIYFKNDKSLTDLSQQVFDDYSVIGTAVLEYITQQIAPKNLDNPSKKEQELIAKKTEKAKYLSLETIKLALEEFNKHRDIDKQCRFEEILANFAAIPMIFDEIAQNKDNLAQISIKYQNQGKKDLLQASAEDDVKAIKDLLDQTNNLLHKLKIFHISQSEDKANILDKDEHFYLVFEECYFELANIVPLYNKIRNYITQKPYSDEKFKLNFENSTLANGWDKNKEPDNTAILFIKDDKYYLGVMNKKNNKIFDDKAIKENKGEGYKKIVYKLLPGANKMLPKVFFSAKSIKFYNPSEDILRIRNHSTHTKNGSPQKGYEKFEFNIEDCRKFIDFYKQSISKHPEWKDFGFRFSDTQRYNSIDEFYREVENQGYKLTFENISESYIDSVVNQGKLYLFQIYNKDFSAYSKGRPNLHTLYWKALFDERNLQDVVYKLNGEAELFYRKQSIPKKITHPAKEAIANKNKDNPKKESVFEYDLIKDKRFTEDKFFFHCPITINFKSSGANKFNDEINLLLKEKANDVHILSIARGERHLAYYTLVDGKGNIIKQDTFNIIGNDRMKTNYHDKLAAIEKDRDSARKDWKKINNIKEMKEGYLSQVVHEIAKLVIEYNAIVVFADLNFGFKRGRFKVEKQVYQKLEKMLIEKLNYLVFKDNEFDKTGGVLRAYQLTAPFETFKKMGKQTGIIYYVPAGFTSKICPVTGFVNQLYPKYESVSKSQEFFSKFDKICYNLDKGYFEFSFDYKNFGDKAAKGKWTIASFGSRLINFRNSDKNHNWDTREVYPTKELEKLLKDYSIEYGHGECIKAAICGESDKKFFAKLTSVLNTILQMRNSKTGTELDYLISPVADVNGNFFDSRQAPKNMPQDAAANGAYHIGLKGLMLLGRIKNNQEGKKLNLVIKNEEYFEFVQNRNN

SEQ ID NO: 218 - protein, 1052 aa, Staphylococcus aureus
  REGION 1..1052: note = MISC_FEATURE - Exemplary SaCas9 polypeptide sequence
KRNYILGLDIGITSVGYGIIDYETRDVIDAGVRLFKEANVENNEGRRSKRGARRLKRRRRHRIQRVKKLLFDYNLLTDHSELSGINPYEARVKGLSQKLSEEEFSAALLHLAKRRGVHNVNEVEEDTGNELSTKEQISRNSKALEEKYVAELQLERLKKDGEVRGSINRFKTSDYVKEAKQLLKVQKAYHQLDQSFIDTYIDLLETRRTYYEGPGEGSPFGWKDIKEWYEMLMGHCTYFPEELRSVKYAYNADLYNALNDLNNLVITRDENEKLEYYEKFQIIENVFKQKKKPTLKQIAKEILVNEEDIKGYRVTSTGKPEFTNLKVYHDIKDITARKEIIENAELLDQIAKILTIYQSSEDIQEELTNLNSELTQEEIEQISNLKGYTGTHNLSLKAINLILDELWHTNDNQIAIFNRLKLVPKKVDLSQQKEIPTTLVDDFILSPVVKRSFIQSIKVINAIIKKYGLPNDIIIELAREKNSKDAQKMINEMQKRNRQTNERIEEIIRTTGKENAKYLIEKIKLHDMQEGKCLYSLEAIPLEDLLNNPFNYEVDHIIPRSVSFDNSFNNKVLVKQEENSKKGNRTPFQYLSSSDSKISYETFKKHILNLAKGKGRISKTKKEYLLEERDINRFSVQKDFINRNLVDTRYATRGLMNLLRSYFRVNNLDVKVKSINGGFTSFLRRKWKFKKERNKGYKHHAEDALIIANADFIFKEWKKLDKAKKVMENQMFEEKQAESMPEIETEQEYKEIFITPHQIKHIKDFKDYKYSHRVDKKPNRELINDTLYSTRKDDKGNTLIVNNLNGLYDKDNDKLKKLINKSPEKLLMYHHDPQTYQKLKLIMEQYGDEKNPLYKYYEETGNYLTKYSKKDNGPVIKKIKYYGNKLNAHLDITDDYPNSRNKVVKLSLKPYRFDVYLDNGVYKFVTVKNLDVIKKENYYEVNSKCYEEAKKLKKISNQAEFIASFYNNDLIKINGELYRVIGVNNDLLNRIEVNMIDITYREYLENMNDKRPPRIIKTIASKTQSIKKYSTDILGNLYEVKSKKHPQIIKKG

SEQ ID NO: 219 - protein, 1052 aa, Staphylococcus aureus
  REGION 1..1052: note = MISC_FEATURE - SaCas9n polypeptide sequence
KRNYILGLDIGITSVGYGIIDYETRDVIDAGVRLFKEANVENNEGRRSKRGARRLKRRRRHRIQRVKKLLFDYNLLTDHSELSGINPYEARVKGLSQKLSEEEFSAALLHLAKRRGVHNVNEVEEDTGNELSTKEQISRNSKALEEKYVAELQLERLKKDGEVRGSINRFKTSDYVKEAKQLLKVQKAYHQLDQSFIDTYIDLLETRRTYYEGPGEGSPFGWKDIKEWYEMLMGHCTYFPEELRSVKYAYNADLYNALNDLNNLVITRDENEKLEYYEKFQIIENVFKQKKKPTLKQIAKEILVNEEDIKGYRVTSTGKPEFTNLKVYHDIKDITARKEIIENAELLDQIAKILTIYQSSEDIQEELTNLNSELTQEEIEQISNLKGYTGTHNLSLKAINLILDELWHTNDNQIAIFNRLKLVPKKVDLSQQKEIPTTLVDDFILSPVVKRSFIQSIKVINAIIKKYGLPNDIIIELAREKNSKDAQKMINEMQKRNRQTNERIEEIIRTTGKENAKYLIEKIKLHDMQEGKCLYSLEAIPLEDLLNNPFNYEVDHIIPRSVSFDNSFNNKVLVKQEEASKKGNRTPFQYLSSSDSKISYETFKKHILNLAKGKGRISKTKKEYLLEERDINRFSVQKDFINRNLVDTRYATRGLMNLLRSYFRVNNLDVKVKSINGGFTSFLRRKWKFKKERNKGYKHHAEDALIIANADFIFKEWKKLDKAKKVMENQMFEEKQAESMPEIETEQEYKEIFITPHQIKHIKDFKDYKYSHRVDKKPNRELINDTLYSTRKDDKGNTLIVNNLNGLYDKDNDKLKKLINKSPEKLLMYHHDPQTYQKLKLIMEQYGDEKNPLYKYYEETGNYLTKYSKKDNGPVIKKIKYYGNKLNAHLDITDDYPNSRNKVVKLSLKPYRFDVYLDNGVYKFVTVKNLDVIKKENYYEVNSKCYEEAKKLKKISNQAEFIASFYNNDLIKINGELYRVIGVNNDLLNRIEVNMIDITYREYLENMNDKRPPRIIKTIASKTQSIKKYSTDILGNLYEVKSKKHPQIIKKG

SEQ ID NO: 220 - protein, 1052 aa, Staphylococcus aureus
  REGION 1..1052: note = MISC_FEATURE - SaKKH Cas9 polypeptide sequence
KRNYILGLDIGITSVGYGIIDYETRDVIDAGVRLFKEANVENNEGRRSKRGARRLKRRRRHRIQRVKKLLFDYNLLTDHSELSGINPYEARVKGLSQKLSEEEFSAALLHLAKRRGVHNVNEVEEDTGNELSTKEQISRNSKALEEKYVAELQLERLKKDGEVRGSINRFKTSDYVKEAKQLLKVQKAYHQLDQSFIDTYIDLLETRRTYYEGPGEGSPFGWKDIKEWYEMLMGHCTYFPEELRSVKYAYNADLYNALNDLNNLVITRDENEKLEYYEKFQIIENVFKQKKKPTLKQIAKEILVNEEDIKGYRVTSTGKPEFTNLKVYHDIKDITARKEIIENAELLDQIAKILTIYQSSEDIQEELTNLNSELTQEEIEQISNLKGYTGTHNLSLKAINLILDELWHTNDNQIAIFNRLKLVPKKVDLSQQKEIPTTLVDDFILSPVVKRSFIQSIKVINAIIKKYGLPNDIIIELAREKNSKDAQKMINEMQKRNRQTNERIEEIIRTTGKENAKYLIEKIKLHDMQEGKCLYSLEAIPLEDLLNNPFNYEVDHIIPRSVSFDNSFNNKVLVKQEEASKKGNRTPFQYLSSSDSKISYETFKKHILNLAKGKGRISKTKKEYLLEERDINRFSVQKDFINRNLVDTRYATRGLMNLLRSYFRVNNLDVKVKSINGGFTSFLRRKWKFKKERNKGYKHHAEDALIIANADFIFKEWKKLDKAKKVMENQMFEEKQAESMPEIETEQEYKEIFITPHQIKHIKDFKDYKYSHRVDKKPNRKLINDTLYSTRKDDKGNTLIVNNLNGLYDKDNDKLKKLINKSPEKLLMYHHDPQTYQKLKLIMEQYGDEKNPLYKYYEETGNYLTKYSKKDNGPVIKKIKYYGNKLNAHLDITDDYPNSRNKVVKLSLKPYRFDVYLDNGVYKFVTVKNLDVIKKENYYEVNSKCYEEAKKLKKISNQAEFIASFYKNDLIKINGELYRVIGVNNDLLNRIEVNMIDITYREYLENMNDKRPPHIIKTIASKTQSIKKYSTDILGNLYEVKSKKHPQIIKKG

SEQ ID NO: 221 - protein, 707 aa, synthetic construct
  REGION 1..707: note = Casphi-1 polypeptide sequence
MADTPTLFTQFLRHHLPGQRFRKDILKQAGRILANKGEDATIAFLRGKSEESPPDFQPPVKCPIIACSRPLTEWPIYQASVAIQGYVYGQSLAEFEASDPGCSKDGLLGWFDKTGVCTDYFSVQGLNLIFQNARKRYIGVQTKVTNRNEKRHKKLKRINAKRIAEGLPELTSDEPESALDETGHLIDPPGLNTNIYCYQQVSPKPLALSEVNQLPTAYAGYSTSGDDPIQPMVTKDRLSISKGQPGYIPEHQRALLSQKKHRRMRGYGLKARALLVIVRIQDDWAVIDLRSLLRNAYWRRIVQTKEPSTITKLLKLVTGDPVLDATRMVATFTYKPGIVQVRSAKCLKNKQGSKLFSERYLNETVSVTSIDLGSNNLVAVATYRLVNGNTPELLQRFTLPSHLVKDFERYKQAHDTLEDSIQKTAVASLPQGQQTEIRMWSMYGFREAQERVCQELGLADGSIPWNVMTATSTILTDLFLARGGDPKKCMFTSEPKKKKNSKQVLYKIRDRAWAKMYRTLLSKETREAWNKALWGLKRGSPDYARLSKRKEELARRCVNYTISTAEKRAQCGRTIVALEDLNIGFFHGRGKQEPGWVGLFTRKKENRWLMQALHKAFLELAHHRGYHVIEVNPAYTSQTCPVCRHCDPDNRDQHNREAFHCIGCGFRGNADLDVATHNIAMVAITGESLKRARGSVASKTPQPLAAE

SEQ ID NO: 222 - protein, 757 aa, synthetic construct
  REGION 1..757: note = Casphi-2 polypeptide sequence
MPKPAVESEFSKVLKKHFPGERFRSSYMKRGGKILAAQGEEAVVAYLQGKSEEEPPNFQPPAKCHVVTKSRDFAEWPIMKASEAIQRYIYALSTTERAACKPGKSSESHAAWFAATGVSNHGYSHVQGLNLIFDHTLGRYDGVLKKVQLRNEKARARLESINASRADEGLPEIKAEEEEVATNETGHLLQPPGINPSFYVYQTISPQAYRPRDEIVLPPEYAGYVRDPNAPIPLGVVRNRCDIQKGCPGYIPEWQREAGTAISPKTGKAVTVPGLSPKKNKRMRRYWRSEKEKAQDALLVTVRIGTDWVVIDVRGLLRNARWRTIAPKDISLNALLDLFTGDPVIDVRRNIVTFTYTLDACGTYARKWTLKGKQTKATLDKLTATQTVALVAIDLGQTNPISAGISRVTQENGALQCEPLDRFTLPDDLLKDISAYRIAWDRNEEELRARSVEALPEAQQAEVRALDGVSKETARTQLCADFGLDPKRLPWDKMSSNTTFISEALLSNSVSRDQVFFTPAPKKGAKKKAPVEVMRKDRTWARAYKPRLSVEAQKLKNEALWALKRTSPEYLKLSRRKEELCRRSINYVIEKTRRRTQCQIVIPVIEDLNVRFFHGSGKRLPGWDNFFTAKKENRWFIQGLHKAFSDLRTHRSFYVFEVRPERTSITCPKCGHCEVGNRDGEAFQCLSCGKTCNADLDVATHNLTQVALTGKTMPKREEPRDAQGTAPARKTKKASKSKAPPAEREDQTPAQEPSQTS

SEQ ID NO: 223 - protein, 766 aa, synthetic construct
  REGION 1..766: note = Casphi-3 polypeptide sequence
MEKEITELTKIRREFPNKKFSSTDMKKAGKLLKAEGPDAVRDFLNSCQEIIGDFKPPVKTNIVSISRPFEEWPVSMVGRAIQEYYFSLTKEELESVHPGTSSEDHKSFFNITGLSNYNYTSVQGLNLIFKNAKAIYDGTLVKANNKNKKLEKKFNEINHKRSLEGLPIITPDFEEPFDENGHLNNPPGINRNIYGYQGCAAKVFVPSKHKMVSLPKEYEGYNRDPNLSLAGFRNRLEIPEGEPGHVPWFQRMDIPEGQIGHVNKIQRFNFVHGKNSGKVKFSDKTGRVKRYHHSKYKDATKPYKFLEESKKVSALDSILAIITIGDDWVVFDIRGLYRNVFYRELAQKGLTAVQLLDLFTGDPVIDPKKGVVTFSYKEGVVPVFSQKIVPRFKSRDTLEKLTSQGPVALLSVDLGQNEPVAARVCSLKNINDKITLDNSCRISFLDDYKKQIKDYRDSLDELEIKIRLEAINSLETNQQVEIRDLDVFSADRAKANTVDMFDIDPNLISWDSMSDARVSTQISDLYLKNGGDESRVYFEINNKRIKRSDYNISQLVRPKLSDSTRKNLNDSIWKLKRTSEEYLKLSKRKLELSRAVVNYTIRQSKLLSGINDIVIILEDLDVKKKFNGRGIRDIGWDNFFSSRKENRWFIPAFHKAFSELSSNRGLCVIEVNPAWTSATCPDCGFCSKENRDGINFTCRKCGVSYHADIDVATLNIARVAVLGKPMSGPADRERLGDTKKPRVARSRKTMKRKDISNSTVEAMVTA

SEQ ID NO: 224 - protein, 765 aa, synthetic construct
  REGION 1..765: note = Casphi-4 polypeptide sequence
MYSLEMADLKSEPSLLAKLLRDRFPGKYWLPKYWKLAEKKRLTGGEEAACEYMADKQLDSPPPNFRPPARCVILAKSRPFEDWPVHRVASKAQSFVIGLSEQGFAALRAAPPSTADARRDWLRSHGASEDDLMALEAQLLETIMGNAISLHGGVLKKIDNANVKAAKRLSGRNEARLNKGLQELPPEQEGSAYGADGLLVNPPGLNLNIYCRKSCCPKPVKNTARFVGHYPGYLRDSDSILISGTMDRLTIIEGMPGHIPAWQREQGLVKPGGRRRRLSGSESNMRQKVDPSTGPRRSTRSGTVNRSNQRTGRNGDPLLVEIRMKEDWVLLDARGLLRNLRWRESKRGLSCDHEDLSLSGLLALFSGDPVIDPVRNEVVFLYGEGIIPVRSTKPVGTRQSKKLLERQASMGPLTLISCDLGQTNLIAGRASAISLTHGSLGVRSSVRIELDPEIIKSFERLRKDADRLETEILTAAKETLSDEQRGEVNSHEKDSPQTAKASLCRELGLHPPSLPWGQMGPSTTFIADMLISHGRDDDAFLSHGEFPTLEKRKKFDKRFCLESRPLLSSETRKALNESLWEVKRTSSEYARLSQRKKEMARRAVNFVVEISRRKTGLSNVIVNIEDLNVRIFHGGGKQAPGWDGFFRPKSENRWFIQAIHKAFSDLAAHHGIPVIESDPQRTSMTCPECGHCDSKNRNGVRFLCKGCGASMDADFDAACRNLERVALTGKPMPKPSTSCERLLSATTGKVCSDHSLSHDAIEKAS

SEQ ID NO: 225 - protein, 793 aa, synthetic construct
  REGION 1..793: note = Casphi-5 polypeptide sequence
MSSLPTPLELLKQKHADLFKGLQFSSKDNKMAGKVLKKDGEEAALAFLSERGVSRGELPNFRPPAKTLVVAQSRPFEEFPIYRVSEAIQLYVYSLSVKELETVPSGSSTKKEHQRFFQDSSVPDFGYTSVQGLNKIFGLARGIYLGVITRGENQLQKAKSKHEALNKKRRASGEAETEFDPTPYEYMTPERKLAKPPGVNHSIMCYVDISVDEFDFRNPDGIVLPSEYAGYCREINTAIEKGTVDRLGHLKGGPGYIPGHQRKESTTEGPKINFRKGRIRRSYTALYAKRDSRRVRQGKLALPSYRHHMMRLNSNAESAILAVIFFGKDWVVFDLRGLLRNVRWRNLFVDGSTPSTLLGMFGDPVIDPKRGVVAFCYKEQIVPVVSKSITKMVKAPELLNKLYLKSEDPLVLVAIDLGQTNPVGVGVYRVMNASLDYEVVTRFALESELLREIESYRQRTNAFEAQIRAETFDAMTSEEQEEITRVRAFSASKAKENVCHRFGMPVDAVDWATMGSNTIHIAKWVMRHGDPSLVEVLEYRKDNEIKLDKNGVPKKVKLTDKRIANLTSIRLRFSQETSKHYNDTMWELRRKHPVYQKLSKSKADFSRRVVNSIIRRVNHLVPRARIVFIIEDLKNLGKVFHGSGKRELGWDSYFEPKSENRWFIQVLHKAFSETGKHKGYYIIECWPNWTSCTCPKCSCCDSENRHGEVFRCLACGYTCNTDFGTAPDNLVKIATTGKGLPGPKKRCKGSSKGKNPKIARSSETGVSVTESGAPKVKKSSPTQTSQSSSQSAP

SEQ ID NO: 226 - protein, 441 aa, synthetic construct
  REGION 1..441: note = Casphi-6 polypeptide sequence
MNKIEKEKTPLAKLMNENFAGLRFPFAIIKQAGKKLLKEGELKTIEYMTGKGSIEPLPNFKPPVKCLIVAKRRDLKYFPICKASCEIQSYVYSLNYKDFMDYFSTPMTSQKQHEEFFKKSGLNIEYQNVAGLNLIFNNVKNTYNGVILKVKNRNEKLKKKAIKNNYEFEEIKTFNDDGCLINKPGINNVIYCFQSISPKILKNITHLPKEYNDYDCSVDRNIIQKYVSRLDIPESQPGHVPEWQRKLPEFNNTNNPRRRRKWYSNGRNISKGYSVDQVNQAKIEDSLLAQIKIGEDWIILDIRGLLRDLNRRELISYKNKLTIKDVLGFFSDYPIIDIKKNLVTFCYKEGVIQVVSQKSIGNKKSKQLLEKLIENKPIALVSIDLGQTNPVSVKISKLNKINNKISIESFTYRFLNEEILKEIEKYRKDYDKLELKLINEA

SEQ ID NO: 227 - protein, 772 aa, synthetic construct
  REGION 1..772: note = Casphi-7 polypeptide sequence
MSNTAVSTREHMSNKTTPPSPLSLLLRAHFPGLKFESQDYKIAGKKLRDGGPEAVISYLTGKGQAKLKDVKPPAKAFVIAQSRPFIEWDLVRVSRQIQEKIFGIPATKGRPKQDGLSETAFNEAVASLEVDGKSKLNEETRAAFYEVLGLDAPSLHAQAQNALIKSAISIREGVLKKVENRNEKNLSKTKRRKEAGEEATFVEEKAHDERGYLIHPPGVNQTIPGYQAVVIKSCPSDFIGLPSGCLAKESAEALTDYLPHDRMTIPKGQPGYVPEWQHPLLNRRKNRRRRDWYSASLNKPKATCSKRSGTPNRKNSRTDQIQSGRFKGAIPVLMRFQDEWVIIDIRGLLRNARYRKLLKEKSTIPDLLSLFTGDPSIDMRQGVCTFIYKAGQACSAKMVKTKNAPEILSELTKSGPVVLVSIDLGQTNPIAAKVSRVTQLSDGQLSHETLLRELLSNDSSDGKEIARYRVASDRLRDKLANLAVERLSPEHKSEILRAKNDTPALCKARVCAALGLNPEMIAWDKMTPYTEFLATAYLEKGGDRKVATLKPKNRPEMLRRDIKFKGTEGVRIEVSPEAAEAYREAQWDLQRTSPEYLRLSTWKQELTKRILNQLRHKAAKSSQCEVVVMAFEDLNIKMMHGNGKWADGGWDAFFIKKRENRWFMQAFHKSLTELGAHKGVPTIEVTPHRTSITCTKCGHCDKANRDGERFACQKCGFVAHADLEIATDNIERVALTGKPMPKPESERSGDAKKSVGARKAAFKPEEDAEAAE

SEQ ID NO: 228 - protein, 717 aa, synthetic construct
  REGION 1..717: note = Casphi-8 polypeptide sequence
MIKPTVSQFLTPGFKLIRNHSRTAGLKLKNEGEEACKKFVRENEIPKDECPNFQGGPAIANIIAKSREFTEWEIYQSSLAIQEVIFTLPKDKLPEPILKEEWRAQWLSEHGLDTVPYKEAAGLNLIIKNAVNTYKGVQVKVDNKNKNNLAKINRKNEIAKLNGEQEISFEEIKAFDDKGYLLQKPSPNKSIYCYQSVSPKPFITSKYHNVNLPEEYIGYYRKSNEPIVSPYQFDRLRIPIGEPGYVPKWQYTFLSKKENKRRKLSKRIKNVSPILGIICIKKDWCVFDMRGLLRTNHWKKYHKPTDSINDLFDYFTGDPVIDTKANVVRFRYKMENGIVNYKPVREKKGKELLENICDQNGSCKLATVDVGQNNPVAIGLFELKKVNGELTKTLISRHPTPIDFCNKITAYRERYDKLESSIKLDAIKQLTSEQKIEVDNYNNNFTPQNTKQIVCSKLNINPNDLPWDKMISGTHFISEKAQVSNKSEIYFTSTDKGKTKDVMKSDYKWFQDYKPKLSKEVRDALSDIEWRLRRESLEFNKLSKSREQDARQLANWISSMCDVIGIENLVKKNNFFGGSGKREPGWDNFYKPKKENRWWINAIHKALTELSQNKGKRVILLPAMRTSITCPKCKYCDSKNRNGEKFNCLKCGIELNADIDVATENLATVAITAQSMPKPTCERSGDAKKPVRARKAKAPEFHDKLAPSYTVVLREAV

SEQ ID NO: 229 - protein, 793 aa, synthetic construct
  REGION 1..793: note = Casphi-9 polypeptide sequence
MRSSREIGDKILMRQPAEKTAFQVFRQEVIGTQKLSGGDAKTAGRLYKQGKMEAAREWLLKGARDDVPPNFQPPAKCLVVAVSHPFEEWDISKTNHDVQAYIYAQPLQAEGHLNGLSEKWEDTSADQHKLWFEKTGVPDRGLPVQAINKIAKAAVNRAFGVVRKVENRNEKRRSRDNRIAEHNRENGLTEVVREAPEVATNADGFLLHPPGIDPSILSYASVSPVPYNSSKHSFVRLPEEYQAYNVEPDAPIPQFVVEDRFAIPPGQPGYVPEWQRLKCSTNKHRRMRQWSNQDYKPKAGRRAKPLEFQAHLTRERAKGALLVVMRIKEDWVVFDVRGLLRNVEWRKVLSEEAREKLTLKGLLDLFTGDPVIDTKRGIVTFLYKAEITKILSKRTVKTKNARDLLLRLTEPGEDGLRREVGLVAVDLGQTHPIAAAIYRIGRTSAGALESTVLHRQGLREDQKEKLKEYRKRHTALDSRLRKEAFETLSVEQQKEIVTVSGSGAQITKDKVCNYLGVDPSTLPWEKMGSYTHFISDDFLRRGGDPNIVHFDRQPKKGKVSKKSQRIKRSDSQWVGRMRPRLSQETAKARMEADWAAQNENEEYKRLARSKQELARWCVNTLLQNTRCITQCDEIVVVIEDLNVKSLHGKGAREPGWDNFFTPKTENRWFIQILHKTFSELPKHRGEHVIEGCPLRTSITCPACSYCDKNSRNGEKFVCVACGATFHADFEVATYNLVRLATTGMPMPKSLERQGGGEKAGGARKARKKAKQVEKIVVQANANVTMNGASLHSP

SEQ ID NO: 230 - protein, 812 aa, synthetic construct
  REGION 1..812: note = Casphi-10 polypeptide sequence
MDMLDTETNYATETPAQQQDYSPKPPKKAQRAPKGFSKKARPEKKPPKPITLFTQKHFSGVRFLKRVIRDASKILKLSESRTITFLEQAIERDGSAPPDVTPPVHNTIMAVTRPFEEWPEVILSKALQKHCYALTKKIKIKTWPKKGPGKKCLAAWSARTKIPLIPGQVQATNGLFDRIGSIYDGVEKKVTNRNANKKLEYDEAIKEGRNPAVPEYETAYNIDGTLINKPGYNPNLYITQSRTPRLITEADRPLVEKILWQMVEKKTQSRNQARRARLEKAAHLQGLPVPKFVPEKVDRSQKIEIRIIDPLDKIEPYMPQDRMAIKASQDGHVPYWQRPFLSKRRNRRVRAGWGKQVSSIQAWLTGALLVIVRLGNEAFLADIRGALRNAQWRKLLKPDATYQSLFNLFTGDPVVNTRTNHLTMAYREGVVNIVKSRSFKGRQTREHLLTLLGQGKTVAGVSFDLGQKHAAGLLAAHFGLGEDGNPVFTPIQACFLPQRYLDSLTNYRNRYDALTLDMRRQSLLALTPAQQQEFADAQRDPGGQAKRACCLKLNLNPDEIRWDLVSGISTMISDLYIERGGDPRDVHQQVETKPKGKRKSEIRILKIRDGKWAYDFRPKIADETRKAQREQLWKLQKASSEFERLSRYKINIARAIANWALQWGRELSGCDIVIPVLEDLNVGSKFFDGKGKWLLGWDNRFTPKKENRWFIKVLHKAVAELAPHRGVPVYEVMPHRTSMTCPACHYCHPTNREGDRFECQSCHVVKNTDRDVAPYNILRVAVEGKTLDRWQAEKKPQAEPDRPMILIDNQES

SEQ ID NO: 231 - protein, 84 aa, synthetic construct
  REGION 1..84: note = synthetic polypeptide sequence
MTNLSDIIEKETGKQLVIQESILMLPEEVEEVIGNKPESDILVHTAYDESTDENVMLLTSDAPEYKPWALVIQDSNGENKIKML

SEQ ID NO: 232 - protein, 1129 aa, Alicyclobacillus acidoterrestris
  REGION 1..1129: note = MISC_FEATURE - Cas12b/C2c1; sp|T0D7A2|C2C1_ALIAG CRISPR-associated endonuclease C2c1 OS = Alicyclobacillus acido-terrestris (strain ATCC 49025 /DSM 3922/ CIP 106132 / NCIMB 13137/GD3B) GN=c2c1 PE=1 SV=1; Cas12b/C2c1 polypeptide sequence
MAVKSIKVKLRLDDMPEIRAGLWKLHKEVNAGVRYYTEWLSLLRQENLYRRSPNGDGEQECDKTAEECKAELLERLRARQVENGHRGPAGSDDELLQLARQLYELLVPQAIGAKGDAQQIARKFLSPLADKDAVGGLGIAKAGNKPRWVRMREAGEPGWEEEKEKAETRKSADRTADVLRALADFGLKPLMRVYTDSEMSSVEWKPLRKGQAVRTWDRDMFQQAIERMMSWESWNQRVGQEYAKLVEQKNRFEQKNFVGQEHLVHLVNQLQQDMKEASPGLESKEQTAHYVTGRALRGSDKVFEKWGKLAPDAPFDLYDAEIKNVQRRNTRRFGSHDLFAKLAEPEYQALWREDASFLTRYAVYNSILRKLNHAKMFATFTLPDATAHPIWTRFDKLGGNLHQYTFLFNEFGERRHAIRFHKLLKVENGVAREVDDVTVPISMSEQLDNLLPRDPNEPIALYFRDYGAEQHFTGEFGGAKIQCRRDQLAHMHRRRGARDVYLNVSVRVQSQSEARGERRPPYAAVFRLVGDNHRAFVHFDKLSDYLAEHPDDGKLGSEGLLSGLRVMSVDLGLRTSASISVFRVARKDELKPNSKGRVPFFFPIKGNDNLVAVHERSQLLKLPGETESKDLRAIREERQRTLRQLRTQLAYLRLLVRCGSEDVGRRERSWAKLIEQPVDAANHMTPDWREAFENELQKLKSLHGICSDKEWMDAVYESVRRVWRHMGKQVRDWRKDVRSGERPKIRGYAKDVVGGNSIEQIEYLERQYKFLKSWSFFGKVSGQVIRAEKGSRFAITLREHIDHAKEDRLKKLADRIIMEALGYVYALDERGKGKWVAKYPPCQLILLEELSEYQFNNDRPPSENNQLMQWSHRGVFQELINQAQVHDLLVGTMYAAFSSRFDARTGAPGIRCRRVPARCTQEHNPEPFPWWLNKFVVEHTLDACPLRADDLIPTGEGEIFVSPFSAEEGDFHQIHADLNAAQNLQQRLWSDFDISQIRLRCDWGEVDGELVLIPRLTGKRTADSYSNKVFYTNTGVTYYERERGKKRRKVFAQEKLSEEEAELLVEADEAREKSVVLMRDPSGIINRGNWTRQKEFWSMVNQRIEGYLVKQIRSRVPLQDSACENTGDI

SEQ ID NO: 233 - protein, 1368 aa, Mus musculus
  REGION 1..1368: note = MISC_FEATURE - high fidelity Cas9 polypeptide sequence
MDKKYSIGLAIGTNSVGWAVITDEYKVPSKKFKVLGNTDRHSIKKNLIGALLFDSGETAEATRLKRTARRRYTRRKNRICYLQEIFSNEMAKVDDSFFHRLEESFLVEEDKKHERHPIFGNIVDEVAYHEKYPTIYHLRKKLVDSTDKADLRLIYLALAHMIKFRGHFLIEGDLNPDNSDVDKLFIQLVQTYNQLFEENPINASGVDAKAILSARLSKSRRLENLIAQLPGEKKNGLFGNLIALSLGLTPNFKSNFDLAEDAKLQLSKDTYDDDLDNLLAQIGDQYADLFLAAKNLSDAILLSDILRVNTEITKAPLSASMIKRYDEHHQDLTLLKALVRQQLPEKYKEIFFDQSKNGYAGYIDGGASQEEFYKFIKPILEKMDGTEELLVKLNREDLLRKQRTFDNGSIPHQIHLGELHAILRRQEDFYPFLKDNREKIEKILTFRIPYYVGPLARGNSRFAWMTRKSEETITPWNFEEVVDKGASAQSFIERMTAFDKNLPNEKVLPKHSLLYEYFTVYNELTKVKYVTEGMRKPAFLSGEQKKAIVDLLFKTNRKVTVKQLKEDYFKKIECFDSVEISGVEDRFNASLGTYHDLLKIIKDKDFLDNEENEDILEDIVLTLTLFEDREMIEERLKTYAHLFDDKVMKQLKRRRYTGWGALSRKLINGIRDKQSGKTILDFLKSDGFANRNFMALIHDDSLTFKEDIQKAQVSGQGDSLHEHIANLAGSPAIKKGILQTVKVVDELVKVMGRHKPENIVIEMARENQTTQKGQKNSRERMKRIEEGIKELGSQILKEHPVENTQLQNEKLYLYYLQNGRDMYVDQELDINRLSDYDVDHIVPQSFLKDDSIDNKVLTRSDKNRGKSDNVPSEEVVKKMKNYWRQLLNAKLITQRKFDNLTKAERGGLSELDKAGFIKRQLVETRAITKHVAQILDSRMNTKYDENDKLIREVKVITLKSKLVSDFRKDFQFYKVREINNYHHAHDAYLNAVVGTALIKKYPKLESEFVYGDYKVYDVRKMIAKSEQEIGKATAKYFFYSNIMNFFKTEITLANGEIRKRPLIETNGETGEIVWDKGRDFATVRKVLSMPQVNIVKKTEVQTGGFSKESILPKRNSDKLIARKKDWDPKKYGGFDSPTVAYSVLVVAKVEKGKSKKLKSVKELLGITIMERSSFEKNPIDFLEAKGYKEVKKDLIIKLPKYSLFELENGRKRMLASAGELQKGNELALPSKYVNFLYLASHYEKLKGSPEDNEQKQLFVEQHKHYLDEIIEQISEFSKRVILADANLDKVLSAYNKHRDKPIREQAENIIHLFTLTNLGAPAAFKYFDTTIDRKRYTSTKEVLDATLIHQSITGLYETRIDLSQLGGD

SEQ ID NO: 234 - protein, 1368 aa, Streptococcus pyogenes
  REGION 1..1368: note = MISC_FEATURE - PAM-binding SpEQR Cas9 polypeptide sequence
MDKKYSIGLAIGTNSVGWAVITDEYKVPSKKFKVLGNTDRHSIKKNLIGALLFDSGETAEATRLKRTARRRYTRRKNRICYLQEIFSNEMAKVDDSFFHRLEESVLVEEDKKHERHPIFGNIVDEVAYHEKYPTIYHLRKKLVDSTDKADLRLIYLALAHMIKFRGHFLIEGDLNPDNSDVDKLFIQLVQTYNQLFEENPINASGVDAKAILSARLSKSRRLENLIAQLPGEKKNGLFGNLIALSLGLTPNFKSNFDLAEDAKLQLSKDTYDDDLDNLLAQIGDQYADLFLAAKNLSDAILLSDILRVNTEITKAPLSASMIKRYDEHHQDLTLLKALVRQQLPEKYKEIFFDQSKNGYAGYIDGGASQEEFYKFIKPILEKMDGTEELLVKLNREDLLRKQRTFDNGSIPHQIHLGELHAILRRQEDFYPFLKDNREKIEKILTFRIPYYVGPLARGNSRFAWMTRKSEETITPWNFEEVVDKGASAQSFIERMTNFDKNLPNEKVLPKHSLLYEYFTVYNELTKVKYVTEGMRKPAFLSGEQKKAIVDLLFKTNRKVTVKQLKEDYFKKIECFDSVEISGVEDRFNASLGTYHDLLKIIKDKDFLDNEENEDILEDIVLTLTLFEDREMIEERLKTYAHLFDDKVMKQLKRRRYTGWGRLSRKLINGIRDKQSGKTILDFLKSDGFANRNFMQLIHDDSLTFKEDIQKAQVSGQGDSLHEHIANLAGSPAIKKGILQTVKVVDELVKVMGRHKPENIVIEMARENQTTQKGQKNSRERMKRIEEGIKELGSQILKEHPVENTQLQNEKLYLYYLQNGRDMYVDQELDINRLSDYDVDHIVPQSFLKDDSIDNKVLTRSDKNRGKSDNVPSEEVVKKMKNYWRQLLNAKLITQRKFDNLTKAERGGLSELDKAGFIKRQLVETRQITKHVAQILDSRMNTKYDENDKLIREVKVITLKSKLVSDFRKDFQFYKVREINNYHHAHDAYLNAVVGTALIKKYPKLESEFVYGDYKVYDVRKMIAKSEQEIGKATAKYFFYSNIMNFFKTEITLANGEIRKRPLIETNGETGEIVWDKGRDFATVRKVLSMPQVNIVKKTEVQTGGFSKESILPKRNSDKLIARKKDWDPKKYGGFESPTVAYSVLVVAKVEKGKSKKLKSVKELLGITIMERSSFEKNPIDFLEAKGYKEVKKDLIIKLPKYSLFELENGRKRMLASAGELQKGNELALPSKYVNFLYLASHYEKLKGSPEDNEQKQLFVEQHKHYLDEIIEQISEFSKRVILADANLDKVLSAYNKHRDKPIREQAENIIHLFTLTNLGAPAAFKYFDTTIDRKQYRSTKEVLDATLIHQSITGLYETRIDLSQLGGD

SEQ ID NO: 235 - protein, 1368 aa, Streptococcus pyogenes
  REGION 1..1368: note = MISC_FEATURE - PAM-binding SpVQR Cas9 polypeptide sequence
MDKKYSIGLAIGTNSVGWAVITDEYKVPSKKFKVLGNTDRHSIKKNLIGALLFDSGETAEATRLKRTARRRYTRRKNRICYLQEIFSNEMAKVDDSFFHRLEESFLVEEDKKHERHPIFGNIVDEVAYHEKYPTIYHLRKKLVDSTDKADLRLIYLALAHMIKFRGHFLIEGDLNPDNSDVDKLFIQLVQTYNQLFEENPINASGVDAKAILSARLSKSRRLENLIAQLPGEKKNGLFGNLIALSLGLTPNFKSNFDLAEDAKLQLSKDTYDDDLDNLLAQIGDQYADLFLAAKNLSDAILLSDILRVNTEITKAPLSASMIKRYDEHHQDLTLLKALVRQQLPEKYKEIFFDQSKNGYAGYIDGGASQEEFYKFIKPILEKMDGTEELLVKLNREDLLRKQRTFDNGSIPHQIHLGELHAILRRQEDFYPFLKDNREKIEKILTFRIPYYVGPLARGNSRFAWMTRKSEETITPWNFEEVVDKGASAQSFIERMTNFDKNLPNEKVLPKHSLLYEYFTVYNELTKVKYVTEGMRKPAFLSGEQKKAIVDLLFKTNRKVTVKQLKEDYFKKIECFDSVEISGVEDRFNASLGTYHDLLKIIKDKDFLDNEENEDILEDIVLTLTLFEDREMIEERLKTYAHLFDDKVMKQLKRRRYTGWGRLSRKLINGIRDKQSGKTILDFLKSDGFANRNFMQLIHDDSLTFKEDIQKAQVSGQGDSLHEHIANLAGSPAIKKGILQTVKVVDELVKVMGRHKPENIVIEMARENQTTQKGQKNSRERMKRIEEGIKELGSQILKEHPVENTQLQNEKLYLYYLQNGRDMYVDQELDINRLSDYDVDHIVPQSFLKDDSIDNKVLTRSDKNRGKSDNVPSEEVVKKMKNYWRQLLNAKLITQRKFDNLTKAERGGLSELDKAGFIKRQLVETRQITKHVAQILDSRMNTKYDENDKLIREVKVITLKSKLVSDFRKDFQFYKVREINNYHHAHDAYLNAVVGTALIKKYPKLESEFVYGDYKVYDVRKMIAKSEQEIGKATAKYFFYSNIMNFFKTEITLANGEIRKRPLIETNGETGEIVWDKGRDFATVRKVLSMPQVNIVKKTEVQTGGFSKESILPKRNSDKLIARKKDWDPKKYGGFVSPTVAYSVLVVAKVEKGKSKKLKSVKELLGITIMERSSFEKNPIDFLEAKGYKEVKKDLIIKLPKYSLFELENGRKRMLASAGELQKGNELALPSKYVNFLYLASHYEKLKGSPEDNEQKQLFVEQHKHYLDEIIEQISEFSKRVILADANLDKVLSAYNKHRDKPIREQAENIIHLFTLTNLGAPAAFKYFDTTIDRKQYRSTKEVLDATLIHQSITGLYETRIDLSQLGGD

SEQ ID NO: 236 - protein, 1368 aa, Streptococcus pyogenes
  REGION 1..1368: note = MISC_FEATURE - SpVQR Cas9 polypeptide sequence
MDKKYSIGLAIGTNSVGWAVITDEYKVPSKKFKVLGNTDRHSIKKNLIGALLFDSGETAEATRLKRTARRRYTRRKNRICYLQEIFSNEMAKVDDSFFHRLEESFLVEEDKKHERHPIFGNIVDEVAYHEKYPTIYHLRKKLVDSTDKADLRLIYLALAHMIKFRGHFLIEGDLNPDNSDVDKLFIQLVQTYNQLFEENPINASGVDAKAILSARLSKSRRLENLIAQLPGEKKNGLFGNLIALSLGLTPNFKSNFDLAEDAKLQLSKDTYDDDLDNLLAQIGDQYADLFLAAKNLSDAILLSDILRVNTEITKAPLSASMIKRYDEHHQDLTLLKALVRQQLPEKYKEIFFDQSKNGYAGYIDGGASQEEFYKFIKPILEKMDGTEELLVKLNREDLLRKQRTFDNGSIPHQIHLGELHAILRRQEDFYPFLKDNREKIEKILTFRIPYYVGPLARGNSRFAWMTRKSEETITPWNFEEVVDKGASAQSFIERMTNFDKNLPNEKVLPKHSLLYEYFTVYNELTKVKYVTEGMRKPAFLSGEQKKAIVDLLFKTNRKVTVKQLKEDYFKKIECFDSVEISGVEDRFNASLGTYHDLLKIIKDKDFLDNEENEDILEDIVLTLTLFEDREMIEERLKTYAHLFDDKVMKQLKRRRYTGWGRLSRKLINGIRDKQSGKTILDFLKSDGFANRNFMQLIHDDSLTFKEDIQKAQVSGQGDSLHEHIANLAGSPAIKKGILQTVKVVDELVKVMGRHKPENIVIEMARENQTTQKGQKNSRERMKRIEEGIKELGSQILKEHPVENTQLQNEKLYLYYLQNGRDMYVDQELDINRLSDYDVDHIVPQSFLKDDSIDNKVLTRSDKNRGKSDNVPSEEVVKKMKNYWRQLLNAKLITQRKFDNLTKAERGGLSELDKAGFIKRQLVETRQITKHVAQILDSRMNTKYDENDKLIREVKVITLKSKLVSDFRKDFQFYKVREINNYHHAHDAYLNAVVGTALIKKYPKLESEFVYGDYKVYDVRKMIAKSEQEIGKATAKYFFYSNIMNFFKTEITLANGEIRKRPLIETNGETGEIVWDKGRDFATVRKVLSMPQVNIVKKTEVQTGGFSKESILPKRNSDKLIARKKDWDPKKYGGFVSPTVAYSVLVVAKVEKGKSKKLKSVKELLGITIMERSSFEKNPIDFLEAKGYKEVKKDLIIKLPKYSLFELENGRKRMLASARELQKGNELALPSKYVNFLYLASHYEKLKGSPEDNEQKQLFVEQHKHYLDEIIEQISEFSKRVILADANLDKVLSAYNKHRDKPIREQAENIIHLFTLTNLGAPAAFKYFDTTIDRKEYRSTKEVLDATLIHQSITGLYETRIDLSQLGGD

SEQ ID NO: 237 - protein, 1359 aa, Streptococcus macacae
  REGION 1..1359: note = MISC_FEATURE - SpyMacCas9 polypeptide sequence
MDKKYSIGLDIGTNSVGWAVITDDYKVPSKKFKVLGNTDRHSIKKNLIGALLFGSGETAEATRLKRTARRRYTRRKNRICYLQEIFSNEMAKVDDSFFHRLEESFLVEEDKKHERHPIFGNIVDEVAYHEKYPTIYHLRKKLADSTDKADLRLIYLALAHMIKFRGHFLIEGDLNPDNSDVDKLFIQLVQIYNQLFEENPINASRVDAKAILSARLSKSRRLENLIAQLPGEKRNGLFGNLIALSLGLTPNFKSNFDLAEDAKLQLSKDTYDDDLDNLLAQIGDQYADLFLAAKNLSDAILLSDILRVNSEITKAPLSASMIKRYDEHHQDLTLLKALVRQQLPEKYKEIFFDQSKNGYAGYIDGGASQEEFYKFIKPILEKMDGTEELLVKLNREDLLRKQRTFDNGSIPHQIHLGELHAILRRQEDFYPFLKDNREKIEKILTFRIPYYVGPLARGNSRFAWMTRKSEETITPWNFEEVVDKGASAQSFIERMTNFDKNLPNEKVLPKHSLLYEYFTVYNELTKVKYVTEGMRKPAFLSGEQKKAIVDLLFKTNRKVTVKQLKEDYFKKIECFDSVEISGVEDRFNASLGAYHDLLKIIKDKDFLDNEENEDILEDIVLTLTLFEDRGMIEERLKTYAHLFDDKVMKQLKRRRYTGWGRLSRKLINGIRDKQSGKTILDFLKSDGFANRNFMQLIHDDSLTFKEDIQKAQVSGQGHSLHEQIANLAGSPAIKKGILQTVKIVDELVKVMGHKPENIVIEMARENQTTQKGQKNSRERMKRIEEGIKELGSQILKEHPVENTQLQNEKLYLYYLQNGRDMYVDQELDINRLSDYDVDHIVPQSFIKDDSIDNKVLTRSDKNRGKSDNVPSEEVVKKMKNYWRQLLNAKLITQRKFDNLTKAERGGLSELDKAGFIKRQLVETRQITKHVAQILDSRMNTKYDENDKLIREVKVITLKSKLVSDFRKDFQFYKVREINNYHHAHDAYLNAVVGTALIKKYPKLESEFVYGDYKVYDVRKMIAKSEQEIGKATAKYFFYSNIMNFFKTEITLANGEIRKRPLIETNGETGEIVWDKGRDFATVRKVLSMPQVNIVKKTEIQTVGQNGGLFDDNPKSPLEVTPSKLVPLKKELNPKKYGGYQKPTTAYPVLLITDTKQLIPISVMNKKQFEQNPVKFLRDRGYQQVGKNDFIKLPKYTLVDIGDGIKRLWASSKEIHKGNQLVVSKKSQILLYHAHHLDSDLSNDYLQNHNQQFDVLFNEIISFSKKCKLGKEHIQKIENVYSNKKNSASIEELAESFIKLLGFTQLGATSPFNFLGVKLNQKQYKGKKDYILPCTEGTLIRQSITGLYETRVDLSKIGED

SEQ ID NO: 238 - protein, 1410 aa, synthetic construct
  REGION 1..1410: note = CP5 polypeptide sequence
  REGION 1..341: note = MISC_FEATURE - Sequence derived from Cas9
  REGION 342..362: note = MISC_FEATURE - Linker sequence
  REGION 363..1388: note = MISC_FEATURE - Sequence derived from Cas9
  REGION 1389..1410: note = MISC_FEATURE - Bipartite nuclear localization sequence
EIGKATAKYFFYSNIMNFFKTEITLANGEIRKRPLIETNGETGEIVWDKGRDFATVRKVLSMPQVNIVKKTEVQTGGFSKESILPKRNSDKLIARKKDWDPKKYGGFMQPTVAYSVLVVAKVEKGKSKKLKSVKELLGITIMERSSFEKNPIDFLEAKGYKEVKKDLIIKLPKYSLFELENGRKRMLASAKFLQKGNELALPSKYVNFLYLASHYEKLKGSPEDNEQKQLFVEQHKHYLDEIIEQISEFSKRVILADANLDKVLSAYNKHRDKPIREQAENIIHLFTLTNLGAPRAFKYFDTTIARKEYRSTKEVLDATLIHQSITGLYETRIDLSQLGGDGGSGGSGGSGGSGGSGGSGGMDKKYSIGLAIGTNSVGWAVITDEYKVPSKKFKVLGNTDRHSIKKNLIGALLFDSGETAEATRLKRTARRRYTRRKNRICYLQEIFSNEMAKVDDSFFHRLEESFLVEEDKKHERHPIFGNIVDEVAYHEKYPTIYHLRKKLVDSTDKADLRLIYLALAHMIKFRGHFLIEGDLNPDNSDVDKLFIQLVQTYNQLFEENPINASGVDAKAILSARLSKSRRLENLIAQLPGEKKNGLFGNLIALSLGLTPNFKSNFDLAEDAKLQLSKDTYDDDLDNLLAQIGDQYADLFLAAKNLSDAILLSDILRVNTEITKAPLSASMIKRYDEHHQDLTLLKALVRQQLPEKYKEIFFDQSKNGYAGYIDGGASQEEFYKFIKPILEKMDGTEELLVKLNREDLLRKQRTFDNGSIPHQIHLGELHAILRRQEDFYPFLKDNREKIEKILTFRIPYYVGPLARGNSRFAWMTRKSEETITPWNFEEVVDKGASAQSFIERMTNFDKNLPNEKVLPKHSLLYEYFTVYNELTKVKYVTEGMRKPAFLSGEQKKAIVDLLFKTNRKVTVKQLKEDYFKKIECFDSVEISGVEDRFNASLGTYHDLLKIIKDKDFLDNEENEDILEDIVLTLTLFEDREMIEERLKTYAHLFDDKVMKQLKRRRYTGWGRLSRKLINGIRDKQSGKTILDFLKSDGFANRNFMQLIHDDSLTFKEDIQKAQVSGQGDSLHEHIANLAGSPAIKKGILQTVKVVDELVKVMGRHKPENIVIEMARENQTTQKGQKNSRERMKRIEEGIKELGSQILKEHPVENTQLQNEKLYLYYLQNGRDMYVDQELDINRLSDYDVDHIVPQSFLKDDSIDNKVLTRSDKNRGKSDNVPSEEVVKKMKNYWRQLLNAKLITQRKFDNLTKAERGGLSELDKAGFIKRQLVETRQITKHVAQILDSRMNTKYDENDKLIREVKVITLKSKLVSDFRKDFQFYKVREINNYHHAHDAYLNAVVGTALIKKYPKLESEFVYGDYKVYDVRKMIAKSEQEGADKRTADGSEFESPKKKRKV

SEQ ID NO: 239 - protein, 1302 aa, synthetic construct
  REGION 1..1302: note = Cas12c1 polypeptide sequence
MQTKKTHLHLISAKASRKYRRTIACLSDTAKKDLERRKQSGAADPAQELSCLKTIKFKLEVPEGSKLPSFDRISQIYNALETIEKGSLSYLLFALILSGFRIFPNSSAAKTFASSSCYKNDQFASQIKEIFGEMVKNFIPSELESILKKGRRKNNKDWTEENIKRVLNSEFGRKNSEGSSALFDSFLSKFSQELFRKFDSWNEVNKKYLEAAELLDSMLASYGPFDSVCKMIGDSDSRNSLPDKSTIAFTNNAEITVDIESSVMPYMAIAALLREYRQSKSKAAPVAYVQSHLTTTNGNGLSWFFKFGLDLIRKAPVSSKQSTSDGSKSLQELFSVPDDKLDGLKFIKEACEALPEASLLCGEKGELLGYQDFRTSFAGHIDSWVANYVNRLFELIELVNQLPESIKLPSILTQKNHNLVASLGLQEAEVSHSLELFEGLVKNVRQTLKKLAGIDISSSPNEQDIKEFYAFSDVLNRLGSIRNQIENAVQTAKKDKIDLESAIEWKEWKKLKKLPKLNGLGGGVPKQQELLDKALESVKQIRHYQRIDFERVIQWAVNEHCLETVPKFLVDAEKKKINKESSTDFAAKENAVRFLLEGIGAAARGKTDSVSKAAYNWFVVNNFLAKKDLNRYFINCQGCIYKPPYSKRRSLAFALRSDNKDTIEVVWEKFETFYKEISKEIEKFNIFSQEFQTFLHLENLRMKLLLRRIQKPIPAEIAFFSLPQEYYDSLPPNVAFLALNQEITPSEYITQFNLYSSFLNGNLILLRRSRSYLRAKFSWVGNSKLIYAAKEARLWKIPNAYWKSDEWKMILDSNVLVFDKAGNVLPAPTLKKVCEREGDLRLFYPLLRQLPHDWCYRNPFVKSVGREKNVIEVNKEGEPKVASALPGSLFRLIGPAPFKSLLDDCFFNPLDKDLRECMLIVDQEISQKVEAQKVEASLESCTYSIAVPIRYHLEEPKVSNQFENVLAIDQGEAGLAYAVFSLKSIGEAETKPIAVGTIRIPSIRRLIHSVSTYRKKKQRLQNFKQNYDSTAFIMRENVTGDVCAKIVGLMKEFNAFPVLEYDVKNLESGSRQLSAVYKAVNSHFLYFKEPGRDALRKQLWYGGDSWTIDGIEIVTRERKEDGKEGVEKIVPLKVFPGRSVSARFTSKTCSCCGRNVFDWLFTEKKAKTNKKFNVNSKGELTTADGVIQLFEADRSKGPKFYARRKERTPLTKPIAKGSYSLEEIERRVRTNLRRAPKSKQSRDTSQSQYFCVYKDCALHFSGMQADENAAINIGRRFLTALRKNRRSDFPSNVKISDRLLDN

SEQ ID NO: 240 - protein, 1218 aa, synthetic construct
  REGION 1..1218: note = Cas12c2 polypeptide sequence
MTKHSIPLHAFRNSGADARKWKGRIALLAKRGKETMRTLQFPLEMSEPEAAAINTTPFAVAYNAIEGTGKGTLFDYWAKLHLAGFRFFPSGGAATIFRQQAVFEDASWNAAFCQQSGKDWPWLVPSKLYERFTKAPREVAKKDGSKKSIEFTQENVANESHVSLVGASITDKTPEDQKEFFLKMAGALAEKFDSWKSANEDRIVAMKVIDEFLKSEGLHLPSLENIAVKCSVETKPDNATVAWHDAPMSGVQNLAIGVFATCASRIDNIYDLNGGKLSKLIQESATTPNVTALSWLFGKGLEYFRTTDIDTIMQDFNIPASAKESIKPLVESAQAIPTMTVLGKKNYAPFRPNFGGKIDSWIANYASRLMLLNDILEQIEPGFELPQALLDNETLMSGIDMTGDELKELIEAVYAWVDAAKQGLATLLGRGGNVDDAVQTFEQFSAMMDTLNGTLNTISARYVRAVEMAGKDEARLEKLIECKFDIPKWCKSVPKLVGISGGLPKVEEEIKVMNAAFKDVRARMFVRFEEIAAYVASKGAGMDVYDALEKRELEQIKKLKSAVPERAHIQAYRAVLHRIGRAVQNCSEKTKQLFSSKVIEMGVFKNPSHLNNFIFNQKGAIYRSPFDRSRHAPYQLHADKLLKNDWLELLAEISATLMASESTEQMEDALRLERTRLQLQLSGLPDWEYPASLAKPDIEVEIQTALKMQLAKDTVTSDVLQRAFNLYSSVLSGLTFKLLRRSFSLKMRFSVADTTQLIYVPKVCDWAIPKQYLQAEGEIGIAARVVTESSPAKMVTEVEMKEPKALGHFMQQAPHDWYFDASLGGTQVAGRIVEKGKEVGKERKLVGYRMRGNSAYKTVLDKSLVGNTELSQCSMIIEIPYTQTVDADFRAQVQAGLPKVSINLPVKETITASNKDEQMLFDRFVAIDLGERGLGYAVFDAKTLELQESGHRPIKAITNLLNRTHHYEQRPNQRQKFQAKFNVNLSELRENTVGDVCHQINRICAYYNAFPVLEYMVPDRLDKQLKSVYESVTNRYIWSSTDAHKSARVQFWLGGETWEHPYLKSAKDKKPLVLSPGRGASGKGTSQTCSCCGRNPFDLIKDMKPRAKIAVVDGKAKLENSELKLFERNLESKDDMLARRHRNERAGMEQPLTPGNYTVDEIKALLRANLRRAPKNRRTKDTTVSEYHCVFSDCGKTMHADENAAVNIGGKFIADIEK

SEQ ID NO: 241 - protein, 1252 aa, Oleiphilus sp.
  REGION 1..1252: note = MISC_FEATURE - OspCas12c polypeptide sequence
MTKLRHRQKKLTHDWAGSKKREVLGSNGKLQNPLLMPVKKGQVTEFRKAFSAYARATKGEMTDGRKNMFTHSFEPFKTKPSLHQCELADKAYQSLHSYLPGSLAHFLLSAHALGFRIFSKSGEATAFQASSKIEAYESKLASELACVDLSIQNLTISTLFNALTTSVRGKGEETSADPLIARFYTLLTGKPLSRDTQGPERDLAEVISRKIASSFGTWKEMTANPLQSLQFFEEELHALDANVSLSPAFDVLIKMNDLQGDLKNRTIVFDPDAPVFEYNAEDPADIIIKLTARYAKEAVIKNQNVGNYVKNAITTTNANGLGWLLNKGLSLLPVSTDDELLEFIGVERSHPSCHALIELIAQLEAPELFEKNVFSDTRSEVQGMIDSAVSNHIARLSSSRNSLSMDSEELERLIKSFQIHTPHCSLFIGAQSLSQQLESLPEALQSGVNSADILLGSTQYMLTNSLVEESIATYQRTLNRINYLSGVAGQINGAIKRKAIDGEKIHLPAAWSELISLPFIGQPVIDVESDLAHLKNQYQTLSNEFDTLISALQKNFDLNFNKALLNRTQHFEAMCRSTKKNALSKPEIVSYRDLLARLTSCLYRGSLVLRRAGIEVLKKHKIFESNSELREHVHERKHFVFVSPLDRKAKKLLRLTDSRPDLLHVIDEILQHDNLENKDRESLWLVRSGYLLAGLPDQLSSSFINLPIITQKGDRRLIDLIQYDQINRDAFVMLVTSAFKSNLSGLQYRANKQSFVVTRTLSPYLGSKLVYVPKDKDWLVPSQMFEGRFADILQSDYMVWKDAGRLCVIDTAKHLSNIKKSVFSSEEVLAFLRELPHRTFIQTEVRGLGVNVDGIAFNNGDIPSLKTFSNCVQVKVSRTNTSLVQTLNRWFEGGKVSPPSIQFERAYYKKDDQIHEDAAKRKIRFQMPATELVHASDDAGWTPSYLLGIDPGEYGMGLSLVSINNGEVLDSGFIHINSLINFASKKSNHQTKVVPRQQYKSPYANYLEQSKDSAAGDIAHILDRLIYKLNALPVFEALSGNSQSAADQVWTKVLSFYTWGDNDAQNSIRKQHWFGASHWDIKGMLRQPPTEKKPKPYIAFPGSQVSSYGNSQRCSCCGRNPIEQLREMAKDTSIKELKIRNSEIQLFDGTIKLFNPDPSTVIERRRHNLGPSRIPVADRTFKNISPSSLEFKELITIVSRSIRHSPEFIAKKRGIGSEYFCAYSDCNSSLNSEANAAANVAQKFQKQLFFEL

SEQ ID NO: 242 - protein, 767 aa, synthetic construct
  REGION 1..767: note = Cas12g1 polypeptide sequence
MAQASSTPAVSPRPRPRYREERTLVRKLLPRPGQSKQEFRENVKKLRKAFLQFNADVSGVCQWAIQFRPRYGKPAEPTETFWKFFLEPETSLPPNDSRSPEFRRLQAFEAAAGINGAAALDDPAFTNELRDSILAVASRPKTKEAQRLFSRLKDYQPAHRMILAKVAAEWIESRYRRAHQNWERNYEEWKKEKQEWEQNHPELTPEIREAFNQIFQQLEVKEKRVRICPAARLLQNKDNCQYAGKNKHSVLCNQFNEFKKNHLQGKAIKFFYKDAEKYLRCGLQSLKPNVQGPFREDWNKYLRYMNLKEETLRGKNGGRLPHCKNLGQECEFNPHTALCKQYQQQLSSRPDLVQHDELYRKWRREYWREPRKPVFRYPSVKRHSIAKIFGENYFQADFKNSVVGLRLDSMPAGQYLEFAFAPWPRNYRPQPGETEISSVHLHFVGTRPRIGFRFRVPHKRSRFDCTQEELDELRSRTFPRKAQDQKFLEAARKRLLETFPGNAEQELRLLAVDLGTDSARAAFFIGKTFQQAFPLKIVKIEKLYEQWPNQKQAGDRRDASSKQPRPGLSRDHVGRHLQKMRAQASEIAQKRQELTGTPAPETTTDQAAKKATLQPFDLRGLTVHTARMIRDWARLNARQIIQLAEENQVDLIVLESLRGFRPPGYENLDQEKKRRVAFFAHGRIRRKVTEKAVERGMRVVTVPYLASSKVCAECRKKQKDNKQWEKNKKRGLFKCEGCGSQAQVDENAARVLGRVFWGEIELPTAIP

SEQ ID NO: 243 - protein, 870 aa, synthetic construct
  REGION 1..870: note = Cas12h1 polypeptide sequence
MKVHEIPRSQLLKIKQYEGSFVEWYRDLQEDRKKFASLLFRWAAFGYAAREDDGATYISPSQALLERRLLLGDAEDVAIKFLDVLFKGGAPSSSCYSLFYEDFALRDKAKYSGAKREFIEGLATMPLDKIIERIRQDEQLSKIPAEEWLILGAEYSPEEIWEQVAPRIVNVDRSLGKQLRERLGIKCRRPHDAGYCKILMEVVARQLRSHNETYHEYLNQTHEMKTKVANNLTNEFDLVCEFAEVLEEKNYGLGWYVLWQGVKQALKEQKKPTKIQIAVDQLRQPKFAGLLTAKWRALKGAYDTWKLKKRLEKRKAFPYMPNWDNDYQIPVGLTGLGVFTLEVKRTEVVVDLKEHGKLFCSHSHYFGDLTAEKHPSRYHLKFRHKLKLRKRDSRVEPTIGPWIEAALREITIQKKPNGVFYLGLPYALSHGIDNFQIAKRFFSAAKPDKEVINGLPSEMVVGAADLNLSNIVAPVKARIGKGLEGPLHALDYGYGELIDGPKILTPDGPRCGELISLKRDIVEIKSAIKEFKACQREGLTMSEETTTWLSEVESPSDSPRCMIQSRIADTSRRLNSFKYQMNKEGYQDLAEALRLLDAMDSYNSLLESYQRMHLSPGEQSPKEAKFDTKRASFRDLLRRRVAHTIVEYFDDCDIVFFEDLDGPSDSDSRNNALVKLLSPRTLLLYIRQALEKRGIGMVEVAKDGTSQNNPISGHVGWRNKQNKSEIYFYEDKELLVMDADEVGAMNILCRGLNHSVCPYSFVTKAPEKKNDEKKEGDYGKRVKRFLKDRYGSSNVRFLVASMGFVTVTTKRPKDALVGKRLYYHGGELVTHDLHNRMKDEIKYLVEKEVLARRVSLSDSTIKSYKSFAHV

SEQ ID NO: 244 - protein, 1093 aa, synthetic construct
  REGION 1..1093: note = Cas12i1 polypeptide sequence
MSNKEKNASETRKAYTTKMIPRSHDRMKLLGNFMDYLMDGTPIFFELWNQFGGGIDRDIISGTANKDKISDDLLLAVNWFKVMPINSKPQGVSPSNLANLFQQYSGSEPDIQAQEYFASNFDTEKHQWKDMRVEYERLLAELQLSRSDMHHDLKLMYKEKCIGLSLSTAHYITSVMFGTGAKNNRQTKHQFYSKVIQLLEESTQINSVEQLASIILKAGDCDSYRKLRIRCSRKGATPSILKIVQDYELGTNHDDEVNVPSLIANLKEKLGRFEYECEWKCMEKIKAFLASKVGPYYLGSYSAMLENALSPIKGMTTKNCKFVLKQIDAKNDIKYENEPFGKIVEGFFDSPYFESDTNVKWVLHPHHIGESNIKTLWEDLNAIHSKYEEDIASLSEDKKEKRIKVYQGDVCQTINTYCEEVGKEAKTPLVQLLRYLYSRKDDIAVDKIIDGITFLSKKHKVEKQKINPVIQKYPSFNFGNNSKLLGKIISPKDKLKHNLKCNRNQVDNYIWIEIKVLNTKTMRWEKHHYALSSTRFLEEVYYPATSENPPDALAARFRTKTNGYEGKPALSAEQIEQIRSAPVGLRKVKKRQMRLEAARQQNLLPRYTWGKDFNINICKRGNNFEVTLATKVKKKKEKNYKVVLGYDANIVRKNTYAAIEAHANGDGVIDYNDLPVKPIESGFVTVESQVRDKSYDQLSYNGVKLLYCKPHVESRRSFLEKYRNGTMKDNRGNNIQIDFMKDFEAIADDETSLYYFNMKYCKLLQSSIRNHSSQAKEYREEIFELLRDGKLSVLKLSSLSNLSFVMFKVAKSLIGTYFGHLLKKPKNSKSDVKAPPITDEDKQKADPEMFALRLALEEKRLNKVKSKKEVIANKIVAKALELRDKYGPVLIKGENISDTTKKGKKSSTNSFLMDWLARGVANKVKEMVMMHQGLEFVEVNPNFTSHQDPFVHKNPENTFRARYSRCTPSELTEKNRKEILSFLSDKPSKRPTNAYYNEGAMAFLATYGLKKNDVLGVSLEKFKQIMANILHQRSEDQLLFPSRGGMFYLATYKLDADATSVNWNGKQFWVCNADLVAAYNVGLVDIQKDFKKK

SEQ ID NO: 245 - protein, 1054 aa, synthetic construct
  REGION 1..1054: note = Cas12i2 polypeptide sequence
MSSAIKSYKSVLRPNERKNQLLKSTIQCLEDGSAFFFKMLQGLFGGITPEIVRFSTEQEKQQQDIALWCAVNWFRPVSQDSLTHTIASDNLVEKFEEYYGGTASDAIKQYFSASIGESYYWNDCRQQYYDLCRELGVEVSDLTHDLEILCREKCLAVATESNQNNSIISVLFGTGEKEDRSVKLRITKKILEAISNLKEIPKNVAPIQEIILNVAKATKETFRQVYAGNLGAPSTLEKFIAKDGQKEFDLKKLQTDLKKVIRGKSKERDWCCQEELRSYVEQNTIQYDLWAWGEMFNKAHTALKIKSTRNYNFAKQRLEQFKEIQSLNNLLVVKKLNDFFDSEFFSGEETYTICVHHLGGKDLSKLYKAWEDDPADPENAIVVLCDDLKNNFKKEPIRNILRYIFTIRQECSAQDILAAAKYNQQLDRYKSQKANPSVLGNQGFTWTNAVILPEKAQRNDRPNSLDLRIWLYLKLRHPDGRWKKHHIPFYDTRFFQEIYAAGNSPVDTCQFRTPRFGYHLPKLTDQTAIRVNKKHVKAAKTEARIRLAIQQGTLPVSNLKITEISATINSKGQVRIPVKFDVGRQKGTLQIGDRFCGYDQNQTASHAYSLWEVVKEGQYHKELGCFVRFISSGDIVSITENRGNQFDQLSYEGLAYPQYADWRKKASKFVSLWQITKKNKKKEIVTVEAKEKFDAICKYQPRLYKFNKEYAYLLRDIVRGKSLVELQQIRQEIFRFIEQDCGVTRLGSLSLSTLETVKAVKGIIYSYFSTALNASKNNPISDEQRKEFDPELFALLEKLELIRTRKKKQKVERIANSLIQTCLENNIKFIRGEGDLSTTNNATKKKANSRSMDWLARGVFNKIRQLAPMHNITLFGCGSLYTSHQDPLVHRNPDKAMKCRWAAIPVKDIGDWVLRKLSQNLRAKNIGTGEYYHQGVKEFLSHYELQDLEEELLKWRSDRKSNIPCWVLQNRLAEKLGNKEAVVYIPVRGGRIYFATHKVATGAVSIVFDQKQVWVCNADHVAAANIALTVKGIGEQSSDEENPDGSRIKLQLTS

SEQ ID NO: 246 - protein, 4 aa, synthetic construct
  REGION 1..4: note = synthetic peptide sequence
GGGS

SEQ ID NO: 247 - protein, 5 aa, synthetic construct
  REGION 1..5: note = synthetic peptide sequence
GGGGS

SEQ ID NO: 248 - protein, 5 aa, synthetic construct
  REGION 1..5: note = synthetic peptide sequence
EAAAK

SEQ ID NO: 249 - protein, 16 aa, synthetic construct
  REGION 1..16: note = synthetic peptide sequence
SGSETPGTSESATPES

SEQ ID NO: 250 - protein, 6 aa, synthetic construct
  REGION 1..6: note = linker peptide sequence
GGSGGS

SEQ ID NO: 251 - protein, 20 aa, synthetic construct
  REGION 1..20: note = synthetic peptide sequence
GSSGSETPGTSESATPESSG

SEQ ID NO: 252 - DNA, 18 bp, synthetic construct
  misc_feature 1..18: note = synthetic oligonucleotide sequence
  source 1..18: mol_type = other DNA
ggaggctctggaggaagc

SEQ ID NO: 253 - DNA, 60 bp, synthetic construct
  misc_feature 1..60: note = synthetic oligonucleotide sequence
  source 1..60: mol_type = other DNA
ggctcttctggatctgaaacacctggcacaagcgagagcgccacccctgagagctctggc

SEQ ID NO: 254 - protein, 1129 aa, Alicyclobacillus acidiphilus
  REGION 1..1129: note = MISC_FEATURE - AacCas12b polypeptide sequence
MAVKSMKVKLRLDNMPEIRAGLWKLHTEVNAGVRYYTEWLSLLRQENLYRRSPNGDGEQECYKTAEECKAELLERLRARQVENGHCGPAGSDDELLQLARQLYELLVPQAIGAKGDAQQIARKFLSPLADKDAVGGLGIAKAGNKPRWVRMREAGEPGWEEEKAKAEARKSTDRTADVLRALADFGLKPLMRVYTDSDMSSVQWKPLRKGQAVRTWDRDMFQQAIERMMSWESWNQRVGEAYAKLVEQKSRFEQKNFVGQEHLVQLVNQLQQDMKEASHGLESKEQTAHYLTGRALRGSDKVFEKWEKLDPDAPFDLYDTEIKNVQRRNTRRFGSHDLFAKLAEPKYQALWREDASFLTRYAVYNSIVRKLNHAKMFATFTLPDATAHPIWTRFDKLGGNLHQYTFLFNEFGEGRHAIRFQKLLTVEDGVAKEVDDVTVPISMSAQLDDLLPRDPHELVALYFQDYGAEQHLAGEFGGAKIQYRRDQLNHLHARRGARDVYLNLSVRVQSQSEARGERRPPYAAVFRLVGDNHRAFVHFDKLSDYLAEHPDDGKLGSEGLLSGLRVMSVDLGLRTSASISVFRVARKDELKPNSEGRVPFCFPIEGNENLVAVHERSQLLKLPGETESKDLRAIREERQRTLRQLRTQLAYLRLLVRCGSEDVGRRERSWAKLIEQPMDANQMTPDWREAFEDELQKLKSLYGICGDREWTEAVYESVRRVWRHMGKQVRDWRKDVRSGERPKIRGYQKDVVGGNSIEQIEYLERQYKFLKSWSFFGKVSGQVIRAEKGSRFAITLREHIDHAKEDRLKKLADRIIMEALGYVYALDDERGKGKWVAKYPPCQLILLEELSEYQFNNDRPPSENNQLMQWSHRGVFQELLNQAQVHDLLVGTMYAAFSSRFDARTGAPGIRCRRVPARCAREQNPEPFPWWLNKFVAEHKLDGCPLRADDLIPTGEGEFFVSPFSAEEGDFHQIHADLNAAQNLQRRLWSDFDISQIRLRCDWGEVDGEPVLIPRTTGKRTADSYGNKVFYTKTGVTYYERERGKKRRKVFAQEELSEEEAELLVEADEAREKSVVLMRDPSGIINRGDWTRQKEFWSMVNQRIEGYLVKQIRSRVRLQESACENTGDI

SEQ ID NO: 255 - protein, 1140 aa, Bacillus hisashii
  REGION 1..1140: note = MISC_FEATURE - BhCas12b polypeptide sequence
MAPKKKRKVGIHGVPAAATRSFILKIEPNEEVKKGLWKTHEVLNHGIAYYMNILKLIRQEAIYEHHEQDPKNPKKVSKAEIQAELWDFVLKMQKCNSFTHEVDKDEVFNILRELYEELVPSSVEKKGEANQLSNKFLYPLVDPNSQSGKGTASSGRKPRWYNLKIAGDPSWEEEKKKWEEDKKKDPLAKILGKLAEYGLIPLFIPYTDSNEPIVKEIKWMEKSRNQSVRRLDKDMFIQALERFLSWESWNLKVKEEYEKVEKEYKTLEERIKEDIQALKALEQYEKERQEQLLRDTLNTNEYRLSKRGLRGWREIIQKWLKMDENEPSEKYLEVFKDYQRKHPREAGDYSVYEFLSKKENHFIWRNHPEYPYLYATFCEIDKKKKDAKQQATFTLADPINHPLWVRFEERSGSNLNKYRILTEQLHTEKLKKKLTVQLDRLIYPTESGGWEEKGKVDIVLLPSRQFYNQIFLDIEEKGKHAFTYKDESIKFPLKGTLGGARVQFDRDHLRRYPHKVESGNVGRIYFNMTVNIEPTESPVSKSLKIHRDDFPKVVNFKPKELTEWIKDSKGKKLKSGIESLEIGLRVMSIDLGQRQAAAASIFEVVDQKPDIEGKLFFPIKGTELYAVHRASFNIKLPGETLVKSREVLRKAREDNLKLMNQKLNFLRNVLHFQQFEDITEREKRVTKWISRQENSDVPLVYQDELIQIRELMYKPYKDWVAFLKQLHKRLEVEIGKEVKHWRKSLSDGRKGLYGISLKNIDEIDRTRKFLLRWSLRPTEPGEVRRLEPGQRFAIDQLNHLNALKEDRLKKMANTIIMHALGYCYDVRKKKWQAKNPACQIILFEDLSNYNPYEERSRFENSKLMKWSRREIPRQVALQGEIYGLQVGEVGAQFSSRFHAKTGSPGIRCSVVTKEKLQDNRFFKNLQREGRLTLDKIAVLKEGDLYPDKGGEKFISLSKDRKCVTTHADINAAQNLQKRFWTRTHGFYKVYCKAYQVDGQTVYIPESKDQKQKIIEEFGEGYFILKDGVYEWVNAGKLKIKKGSSKQSSSELVDSDILKDSFDLASELKGEKLMLYRDPSGNVFPSDKWMAAGVFFGKLERILISKLTNQYSISTIEDDSSKQSMKRPAATKKAGQAKKKK

SEQ ID NO: 256 - protein, 1108 aa, Bacillus thermoamylovorans
  REGION 1..1108: note = MISC_FEATURE - BTCas12b polypeptide sequence
MATRSFILKIEPNEEVKKGLWKTHEVLNHGIAYYMNILKLIRQEAIYEHHEQDPKNPKKVSKAEIQAELWDFVLKMQKCNSFTHEVDKDVVFNILRELYEELVPSSVEKKGEANQLSNKFLYPLVDPNSQSGKGTASSGRKPRWYNLKIAGDPSWEEEKKKWEEDKKKDPLAKILGKLAEYGLIPLFIPFTDSNEPIVKEIKWMEKSRNQSVRRLDKDMFIQALERFLSWESWNLKVKEEYEKVEKEHKTLEERIKEDIQAFKSLEQYEKERQEQLLRDTLNTNEYRLSKRGLRGWREIIQKWLKMDENEPSEKYLEVFKDYQRKHPREAGDYSVYEFLSKKENHFIWRNHPEYPYLYATFCEIDKKKKDAKQQATFTLADPINHPLWVRFEERSGSNLNKYRILTEQLHTEKLKKKLTVQLDRLIYPTESGGWEEKGKVDIVLLPSRQFYNQIFLDIEEKGKHAFTYKDESIKFPLKGTLGGARVQFDRDHLRRYPHKVESGNVGRIYFNMTVNIEPTESPVSKSLKIHRDDFPKFVNFKPKELTEWIKDSKGKKLKSGIESLEIGLRVMSIDLGQRQAAAASIFEVVDQKPDIEGKLFFPIKGTELYAVHRASFNIKLPGETLVKSREVLRKAREDNLKLMNQKLNFLRNVLHFQQFEDITEREKRVTKWISRQENSDVPLVYQDELIQIRELMYKPYKDWVAFLKQLHKRLEVEIGKEVKHWRKSLSDGRKGLYGISLKNIDEIDRTRKFLLRWSLRPTEPGEVRRLEPGQRFAIDQLNHLNALKEDRLKKMANTIIMHALGYCYDVRKKKWQAKNPACQIILFEDLSNYNPYEERSRFENSKLMKWSRREIPRQVALQGEIYGLQVGEVGAQFSSRFHAKTGSPGIRCSVVTKEKLQDNRFFKNLQREGRLTLDKIAVLKEGDLYPDKGGEKFISLSKDRKLVTTHADINAAQNLQKRFWTRTHGFYKVYCKAYQVDGQTVYIPESKDQKQKIIEEFGEGYFILKDGVYEWGNAGKLKIKKGSSKQSSSELVDSDILKDSFDLASELKGEKLMLYRDPSGNVFPSDKWMAAGVFFGKLERILISKLTNQYSISTIEDDSSKQSM

SEQ ID NO: 257 - protein, 1112 aa, Bacillus sp.
  REGION 1..1112: note = MISC_FEATURE - BvCas12b (Bacillus sp. V3-13) polypeptide sequence
MAIRSIKLKMKTNSGTDSIYLRKALWRTHQLINEGIAYYMNLLTLYRQEAIGDKTKEAYQAELINIIRNQQRNNGSSEEHGSDQEILALLRQLYELIIPSSIGESGDANQLGNKFLYPLVDPNSQSGKGTSNAGRKPRWKRLKEEGNPDWELEKKKDEERKAKDPTVKIFDNLNKYGLLPLFPLFTNIQKDIEWLPLGKRQSVRKWDKDMFIQAIERLLSWESWNRRVADEYKQLKEKTESYYKEHLTGGEEWIEKIRKFEKERNMELEKNAFAPNDGYFITSRQIRGWDRVYEKWSKLPESASPEELWKVVAEQQNKMSEGFGDPKVFSFLANRENRDIWRGHSERIYHIAAYNGLQKKLSRTKEQATFTLPDAIEHPLWIRYESPGGTNLNLFKLEEKQKKNYYVTLSKIIWPSEEKWIEKENIEIPLAPSIQFNRQIKLKQHVKGKQEISFSDYSSRISLDGVLGGSRIQFNRKYIKNHKELLGEGDIGPVFFNLVVDVAPLQETRNGRLQSPIGKALKVISSDFSKVIDYKPKELMDWMNTGSASNSFGVASLLEGMRVMSIDMGQRTSASVSIFEVVKELPKDQEQKLFYSINDTELFAIHKRSFLLNLPGEVVTKNNKQQRQERRKKRQFVRSQIRMLANVLRLETKKTPDERKKAIHKLMEIVQSYDSWTASQKEVWEKELNLLTNMAAFNDEIWKESLVELHHRIEPYVGQIVSKWRKGLSEGRKNLAGISMWNIDELEDTRRLLISWSKRSRTPGEANRIETDEPFGSSLLQHIQNVKDDRLKQMANLIIMTALGFKYDKEEKDRYKRWKETYPACQIILFENLNRYLFNLDRSRRENSRLMKWAHRSIPRTVSMQGEMFGLQVGDVRSEYSSRFHAKTGAPGIRCHALTEEDLKAGSNTLKRLIEDGFINESELAYLKKGDIIPSQGGELFVTLSKRYKKDSDNNELTVIHADINAAQNLQKRFWQQNSEVYRVPCQLARMGEDKLYIPKSQTETIKKYFGKGSFVKNNTEQEVYKWEKSEKMKIKTDTTFDLQDLDGFEDISKTIELAQEQQKKYLTMFRDPSGYFFNNETWRPQKEYWSIVNNIIKSCLKKKILSNKVEL

SEQ ID NO: 258 - DNA, 47 bp, synthetic construct
  misc_feature 1..47: note = 5'UTR oligonucleotide sequence
  source 1..47: mol_type = other DNA
gggaaataagagagaaaagaagagtaagaagaaatataagagccacc

SEQ ID NO: 259 - DNA, 101 bp, synthetic construct
  misc_feature 1..101: note = 3'UTR (TriLink standard UTR)polynucleotide sequence
  source 1..101: mol_type = other DNA
gctggagcctcggtggccatgcttcttgccccttgggcctccccccagcccctcctccccttcctgcacccgtacccccgtggtctttgaataaagtctga

SEQ ID NO: 260 - DNA, 3420 bp, Bacillus hisashii
  misc_feature 1..3420: note = bhCas12b (V4) polynucleotide sequence
  source 1..3420: mol_type = genomic DNA
atggccccaaagaagaagcggaaggtcggtatccacggagtcccagcagccgccaccagatccttcatcctgaagatcgagcccaacgaggaagtgaagaaaggcctctggaaaacccacgaggtgctgaaccacggaatcgcctactacatgaatatcctgaagctgatccggcaagaggccatctacgagcaccacgagcaggaccccaagaatcccaagaaggtgtccaaggccgagatccaggccgagctgtgggatttcgtgctgaagatgcagaagtgcaacagcttcacacacgaggtggacaaggacgaggtgttcaacatcctgagagagctgtacgaggaactggtgcccagcagcgtggaaaagaagggcgaagccaaccagctgagcaacaagtttctgtaccctctggtggaccccaacagccagtctggaaagggaacagccagcagcggcagaaagcccagatggtacaacctgaagattgccggcgatccctcctgggaagaagagaagaagaagtgggaagaagataagaaaaaggacccgctggccaagatcctgggcaagctggctgagtacggactgatccctctgttcatcccctacaccgacagcaacgagcccatcgtgaaagaaatcaagtggatggaaaagtcccggaaccagagcgtgcggcggctggataaggacatgttcattcaggccctggaacggttcctgagctgggagagctggaacctgaaagtgaaagaggaatacgagaaggtcgagaaagagtacaagaccctggaagagaggatcaaagaggacatccaggctctgaaggctctggaacagtatgagaaagagcggcaagaacagctgctgcgggacaccctgaacaccaacgagtaccggctgagcaagagaggccttagaggctggcgggaaatcatccagaaatggctgaaaatggacgagaacgagccctccgagaagtacctggaagtgttcaaggactaccagcggaagcaccctagagaggccggcgattacagcgtgtacgagttcctgtccaagaaagagaaccacttcatctggcggaatcaccctgagtacccctacctgtacgccaccttctgcgagatcgacaagaaaaagaaggacgccaagcagcaggccaccttcacactggccgatcctatcaatcaccctctgtgggtccgattcgaggaaagaagcggcagcaacctgaacaagtacagaatcctgaccgagcagctgcacaccgagaagctgaagaaaaagctgacagtgcagctggaccggctgatctaccctacagaatctggcggctgggaagagaagggcaaagtggacattgtgctgctgcccagccggcagttctacaaccagatcttcctggacatcgaggaaaagggcaagcacgccttcacctacaaggatgagagcatcaagttccctctgaagggcacactcggcggagccagagtgcagttcgacagagatcacctgagaagataccctcacaaggtggaaagcggcaacgtgggcagaatctacttcaacatgaccgtgaacatcgagcctacagagtccccagtgtccaagtctctgaagatccaccgggacgacttccccaaggtggtcaacttcaagcccaaagaactgaccgagtggatcaaggacagcaagggcaagaaactgaagtccggcatcgagtccctggaaatcggcctgagagtgatgagcatcgacctgggacagagacaggccgctgccgcctctattttcgaggtggtggatcagaagcccgacatcgaaggcaagctgtttttcccaatcaagggcaccgagctgtatgccgtgcacagagccagcttcaacatcaagctgcccggcgagacactggtcaagagcagagaagtgctgcggaaggccagagaggacaatctgaaactgatgaaccagaagctcaacttcctgcggaacgtgctgcacttccagcagttcgaggacatcaccgagagagagaagcgggtcaccaagtggatcagcagacaagagaacagcgacgtgcccctggtgtaccaggatgagctgatccagatccgcgagctgatgtacaagccttacaaggactgggtcgccttcctgaagcagctccacaagagactggaagtcgagatcggcaaagaagtgaagcactggcggaagtccctgagcgacggaagaaagggcctgtacggcatctccctgaagaacatcgacgagatcgatcggacccggaagttcctgctgagatggtccctgaggcctaccgaacctggcgaagtgcgtagactggaacccggccagagattcgccatcgaccagctgaatcacctgaacgccctgaaagaagatcggctgaagaagatggccaacaccatcatcatgcacgccctgggctactgctacgacgtgcggaagaagaaatggcaggctaagaaccccgcctgccagatcatcctgttcgaggatctgagcaactacaacccctacgaggaaaggtcccgcttcgagaacagcaagctcatgaagtggtccagacgcgagatccccagacaggttgcactgcagggcgagatctatggcctgcaagtgggagaagtgggcgctcagttcagcagcagattccacgccaagacaggcagccctggcatcagatgtagcgtcgtgaccaaagagaagctgcaggacaatcggttcttcaagaatctgcagagagagggcagactgaccctggacaaaatcgccgtgctgaaagagggcgatctgtacccagacaaaggcggcgagaagttcatcagcctgagcaaggatcggaagtgcgtgaccacacacgccgacatcaacgccgctcagaacctgcagaagcggttctggacaagaacccacggcttctacaaggtgtactgcaaggcctaccaggtggacggccagaccgtgtacatccctgagagcaaggaccagaagcagaagatcatcgaagagttcggcgagggctacttcattctgaaggacggggtgtacgaatgggtcaacgccggcaagctgaaaatcaagaagggcagctccaagcagagcagcagcgagctggtggatagcgacatcctgaaagacagcttcgacctggcctccgagctgaaaggcgaaaagctgatgctgtacagggaccccagcggcaatgtgttccccagcgacaaatggatggccgctggcgtgttcttcggaaagctggaacgcatcctgatcagcaagctgaccaaccagtactccatcagcaccatcgaggacgacagcagcaagcagtctatgaaaaggccggcggccacgaaaaaggccggccaggcaaaaaagaaaaag

SEQ ID NO: 261 - protein, 17 aa, synthetic construct
  REGION 1..17: note = synthetic peptide sequence
MAPKKKRKVGIHGVPAA

SEQ ID NO: 262 - DNA, 51 bp, synthetic construct
  misc_feature 1..51: note = synthetic oligonucleotide sequence
  source 1..51: mol_type = other DNA
atggccccaaagaagaagcggaaggtcggtatccacggagtcccagcagcc

SEQ ID NO: 263 - protein, 1554 aa, synthetic construct
  REGION 1..1554: note = 101 Cas9 TadAins 1015 polypeptide sequence
MDKKYSIGLAIGTNSVGWAVITDEYKVPSKKFKVLGNTDRHSIKKNLIGALLFDSGETAEATRLKRTARRRYTRRKNRICYLQEIFSNEMAKVDDSFFHRLEESFLVEEDKKHERHPIFGNIVDEVAYHEKYPTIYHLRKKLVDSTDKADLRLIYLALAHMIKFRGHFLIEGDLNPDNSDVDKLFIQLVQTYNQLFEENPINASGVDAKAILSARLSKSRRLENLIAQLPGEKKNGLFGNLIALSLGLTPNFKSNFDLAEDAKLQLSKDTYDDDLDNLLAQIGDQYADLFLAAKNLSDAILLSDILRVNTEITKAPLSASMIKRYDEHHQDLTLLKALVRQQLPEKYKEIFFDQSKNGYAGYIDGGASQEEFYKFIKPILEKMDGTEELLVKLNREDLLRKQRTFDNGSIPHQIHLGELHAILRRQEDFYPFLKDNREKIEKILTFRIPYYVGPLARGNSRFAWMTRKSEETITPWNFEEVVDKGASAQSFIERMTNFDKNLPNEKVLPKHSLLYEYFTVYNELTKVKYVTEGMRKPAFLSGEQKKAIVDLLFKTNRKVTVKQLKEDYFKKIECFDSVEISGVEDRFNASLGTYHDLLKIIKDKDFLDNEENEDILEDIVLTLTLFEDREMIEERLKTYAHLFDDKVMKQLKRRRYTGWGRLSRKLINGIRDKQSGKTILDFLKSDGFANRNFMQLIHDDSLTFKEDIQKAQVSGQGDSLHEHIANLAGSPAIKKGILQTVKVVDELVKVMGRHKPENIVIEMARENQTTQKGQKNSRERMKRIEEGIKELGSQILKEHPVENTQLQNEKLYLYYLQNGRDMYVDQELDINRLSDYDVDHIVPQSFLKDDSIDNKVLTRSDKNRGKSDNVPSEEVVKKMKNYWRQLLNAKLITQRKFDNLTKAERGGLSELDKAGFIKRQLVETRQITKHVAQILDSRMNTKYDENDKLIREVKVITLKSKLVSDFRKDFQFYKVREINNYHHAHDAYLNAVVGTALIKKYPKLESEFVYGDYKVGSSGSETPGTSESATPESSGSEVEFSHEYWMRHALTLAKRARDEREVPVGAVLVLNNRVIGEGWNRAIGLHDPTAHAEIMALRQGGLVMQNYRLIDATLYVTFEPCVMCAGAMIHSRIGRVVFGVRNAKTGAAGSLMDVLHYPGMNHRVEITEGILADECAALLCYFFRMPRQVFNAQKKAQSSTDYDVRKMIAKSEQEIGKATAKYFFYSNIMNFFKTEITLANGEIRKRPLIETNGETGEIVWDKGRDFATVRKVLSMPQVNIVKKTEVQTGGFSKESILPKRNSDKLIARKKDWDPKKYGGFDSPTVAYSVLVVAKVEKGKSKKLKSVKELLGITIMERSSFEKNPIDFLEAKGYKEVKKDLIIKLPKYSLFELENGRKRMLASAGELQKGNELALPSKYVNFLYLASHYEKLKGSPEDNEQKQLFVEQHKHYLDEIIEQISEFSKRVILADANLDKVLSAYNKHRDKPIREQAENIIHLFTLTNLGAPAAFKYFDTTIDRKRYTSTKEVLDATLIHQSITGLYETRIDLSQLGGD

SEQ ID NO: 264 - protein, 1554 aa, synthetic construct
  REGION 1..1554: note = 102 Cas9 TadAins 1022 polypeptide sequence
MDKKYSIGLAIGTNSVGWAVITDEYKVPSKKFKVLGNTDRHSIKKNLIGALLFDSGETAEATRLKRTARRRYTRRKNRICYLQEIFSNEMAKVDDSFFHRLEESFLVEEDKKHERHPIFGNIVDEVAYHEKYPTIYHLRKKLVDSTDKADLRLIYLALAHMIKFRGHFLIEGDLNPDNSDVDKLFIQLVQTYNQLFEENPINASGVDAKAILSARLSKSRRLENLIAQLPGEKKNGLFGNLIALSLGLTPNFKSNFDLAEDAKLQLSKDTYDDDLDNLLAQIGDQYADLFLAAKNLSDAILLSDILRVNTEITKAPLSASMIKRYDEHHQDLTLLKALVRQQLPEKYKEIFFDQSKNGYAGYIDGGASQEEFYKFIKPILEKMDGTEELLVKLNREDLLRKQRTFDNGSIPHQIHLGELHAILRRQEDFYPFLKDNREKIEKILTFRIPYYVGPLARGNSRFAWMTRKSEETITPWNFEEVVDKGASAQSFIERMTNFDKNLPNEKVLPKHSLLYEYFTVYNELTKVKYVTEGMRKPAFLSGEQKKAIVDLLFKTNRKVTVKQLKEDYFKKIECFDSVEISGVEDRFNASLGTYHDLLKIIKDKDFLDNEENEDILEDIVLTLTLFEDREMIEERLKTYAHLFDDKVMKQLKRRRYTGWGRLSRKLINGIRDKQSGKTILDFLKSDGFANRNFMQLIHDDSLTFKEDIQKAQVSGQGDSLHEHIANLAGSPAIKKGILQTVKVVDELVKVMGRHKPENIVIEMARENQTTQKGQKNSRERMKRIEEGIKELGSQILKEHPVENTQLQNEKLYLYYLQNGRDMYVDQELDINRLSDYDVDHIVPQSFLKDDSIDNKVLTRSDKNRGKSDNVPSEEVVKKMKNYWRQLLNAKLITQRKFDNLTKAERGGLSELDKAGFIKRQLVETRQITKHVAQILDSRMNTKYDENDKLIREVKVITLKSKLVSDFRKDFQFYKVREINNYHHAHDAYLNAVVGTALIKKYPKLESEFVYGDYKVYDVRKMIGSSGSETPGTSESATPESSGSEVEFSHEYWMRHALTLAKRARDEREVPVGAVLVLNNRVIGEGWNRAIGLHDPTAHAEIMALRQGGLVMQNYRLIDATLYVTFEPCVMCAGAMIHSRIGRVVFGVRNAKTGAAGSLMDVLHYPGMNHRVEITEGILADECAALLCYFFRMPRQVFNAQKKAQSSTDAKSEQEIGKATAKYFFYSNIMNFFKTEITLANGEIRKRPLIETNGETGEIVWDKGRDFATVRKVLSMPQVNIVKKTEVQTGGFSKESILPKRNSDKLIARKKDWDPKKYGGFDSPTVAYSVLVVAKVEKGKSKKLKSVKELLGITIMERSSFEKNPIDFLEAKGYKEVKKDLIIKLPKYSLFELENGRKRMLASAGELQKGNELALPSKYVNFLYLASHYEKLKGSPEDNEQKQLFVEQHKHYLDEIIEQISEFSKRVILADANLDKVLSAYNKHRDKPIREQAENIIHLFTLTNLGAPAAFKYFDTTIDRKRYTSTKEVLDATLIHQSITGLYETRIDLSQLGGD

SEQ ID NO: 265 - protein, 1554 aa, synthetic construct
  REGION 1..1554: note = 103 Cas9 TadAins 1029 polypeptide sequence
MDKKYSIGLAIGTNSVGWAVITDEYKVPSKKFKVLGNTDRHSIKKNLIGALLFDSGETAEATRLKRTARRRYTRRKNRICYLQEIFSNEMAKVDDSFFHRLEESFLVEEDKKHERHPIFGNIVDEVAYHEKYPTIYHLRKKLVDSTDKADLRLIYLALAHMIKFRGHFLIEGDLNPDNSDVDKLFIQLVQTYNQLFEENPINASGVDAKAILSARLSKSRRLENLIAQLPGEKKNGLFGNLIALSLGLTPNFKSNFDLAEDAKLQLSKDTYDDDLDNLLAQIGDQYADLFLAAKNLSDAILLSDILRVNTEITKAPLSASMIKRYDEHHQDLTLLKALVRQQLPEKYKEIFFDQSKNGYAGYIDGGASQEEFYKFIKPILEKMDGTEELLVKLNREDLLRKQRTFDNGSIPHQIHLGELHAILRRQEDFYPFLKDNREKIEKILTFRIPYYVGPLARGNSRFAWMTRKSEETITPWNFEEVVDKGASAQSFIERMTNFDKNLPNEKVLPKHSLLYEYFTVYNELTKVKYVTEGMRKPAFLSGEQKKAIVDLLFKTNRKVTVKQLKEDYFKKIECFDSVEISGVEDRFNASLGTYHDLLKIIKDKDFLDNEENEDILEDIVLTLTLFEDREMIEERLKTYAHLFDDKVMKQLKRRRYTGWGRLSRKLINGIRDKQSGKTILDFLKSDGFANRNFMQLIHDDSLTFKEDIQKAQVSGQGDSLHEHIANLAGSPAIKKGILQTVKVVDELVKVMGRHKPENIVIEMARENQTTQKGQKNSRERMKRIEEGIKELGSQILKEHPVENTQLQNEKLYLYYLQNGRDMYVDQELDINRLSDYDVDHIVPQSFLKDDSIDNKVLTRSDKNRGKSDNVPSEEVVKKMKNYWRQLLNAKLITQRKFDNLTKAERGGLSELDKAGFIKRQLVETRQITKHVAQILDSRMNTKYDENDKLIREVKVITLKSKLVSDFRKDFQFYKVREINNYHHAHDAYLNAVVGTALIKKYPKLESEFVYGDYKVYDVRKMIAKSEQEIGSSGSETPGTSESATPESSGSEVEFSHEYWMRHALTLAKRARDEREVPVGAVLVLNNRVIGEGWNRAIGLHDPTAHAEIMALRQGGLVMQNYRLIDATLYVTFEPCVMCAGAMIHSRIGRVVFGVRNAKTGAAGSLMDVLHYPGMNHRVEITEGILADECAALLCYFFRMPRQVFNAQKKAQSSTDGKATAKYFFYSNIMNFFKTEITLANGEIRKRPLIETNGETGEIVWDKGRDFATVRKVLSMPQVNIVKKTEVQTGGFSKESILPKRNSDKLIARKKDWDPKKYGGFDSPTVAYSVLVVAKVEKGKSKKLKSVKELLGITIMERSSFEKNPIDFLEAKGYKEVKKDLIIKLPKYSLFELENGRKRMLASAGELQKGNELALPSKYVNFLYLASHYEKLKGSPEDNEQKQLFVEQHKHYLDEIIEQISEFSKRVILADANLDKVLSAYNKHRDKPIREQAENIIHLFTLTNLGAPAAFKYFDTTIDRKRYTSTKEVLDATLIHQSITGLYETRIDLSQLGGD

SEQ ID NO: 266 - protein, 1554 aa, synthetic construct
  REGION 1..1554: note = 103 Cas9 TadAins 1040 polypeptide sequence
MDKKYSIGLAIGTNSVGWAVITDEYKVPSKKFKVLGNTDRHSIKKNLIGALLFDSGETAEATRLKRTARRRYTRRKNRICYLQEIFSNEMAKVDDSFFHRLEESFLVEEDKKHERHPIFGNIVDEVAYHEKYPTIYHLRKKLVDSTDKADLRLIYLALAHMIKFRGHFLIEGDLNPDNSDVDKLFIQLVQTYNQLFEENPINASGVDAKAILSARLSKSRRLENLIAQLPGEKKNGLFGNLIALSLGLTPNFKSNFDLAEDAKLQLSKDTYDDDLDNLLAQIGDQYADLFLAAKNLSDAILLSDILRVNTEITKAPLSASMIKRYDEHHQDLTLLKALVRQQLPEKYKEIFFDQSKNGYAGYIDGGASQEEFYKFIKPILEKMDGTEELLVKLNREDLLRKQRTFDNGSIPHQIHLGELHAILRRQEDFYPFLKDNREKIEKILTFRIPYYVGPLARGNSRFAWMTRKSEETITPWNFEEVVDKGASAQSFIERMTNFDKNLPNEKVLPKHSLLYEYFTVYNELTKVKYVTEGMRKPAFLSGEQKKAIVDLLFKTNRKVTVKQLKEDYFKKIECFDSVEISGVEDRFNASLGTYHDLLKIIKDKDFLDNEENEDILEDIVLTLTLFEDREMIEERLKTYAHLFDDKVMKQLKRRRYTGWGRLSRKLINGIRDKQSGKTILDFLKSDGFANRNFMQLIHDDSLTFKEDIQKAQVSGQGDSLHEHIANLAGSPAIKKGILQTVKVVDELVKVMGRHKPENIVIEMARENQTTQKGQKNSRERMKRIEEGIKELGSQILKEHPVENTQLQNEKLYLYYLQNGRDMYVDQELDINRLSDYDVDHIVPQSFLKDDSIDNKVLTRSDKNRGKSDNVPSEEVVKKMKNYWRQLLNAKLITQRKFDNLTKAERGGLSELDKAGFIKRQLVETRQITKHVAQILDSRMNTKYDENDKLIREVKVITLKSKLVSDFRKDFQFYKVREINNYHHAHDAYLNAVVGTALIKKYPKLESEFVYGDYKVYDVRKMIAKSEQEIGKATAKYFFYSGSSGSETPGTSESATPESSGSEVEFSHEYWMRHALTLAKRARDEREVPVGAVLVLNNRVIGEGWNRAIGLHDPTAHAEIMALRQGGLVMQNYRLIDATLYVTFEPCVMCAGAMIHSRIGRVVFGVRNAKTGAAGSLMDVLHYPGMNHRVEITEGILADECAALLCYFFRMPRQVFNAQKKAQSSTDNIMNFFKTEITLANGEIRKRPLIETNGETGEIVWDKGRDFATVRKVLSMPQVNIVKKTEVQTGGFSKESILPKRNSDKLIARKKDWDPKKYGGFDSPTVAYSVLVVAKVEKGKSKKLKSVKELLGITIMERSSFEKNPIDFLEAKGYKEVKKDLIIKLPKYSLFELENGRKRMLASAGELQKGNELALPSKYVNFLYLASHYEKLKGSPEDNEQKQLFVEQHKHYLDEIIEQISEFSKRVILADANLDKVLSAYNKHRDKPIREQAENIIHLFTLTNLGAPAAFKYFDTTIDRKRYTSTKEVLDATLIHQSITGLYETRIDLSQLGGD

SEQ ID NO: 267 - protein, 1554 aa, synthetic construct
  REGION 1..1554: note = 105 Cas9 TadAins 1068 polypeptide sequence
MDKKYSIGLAIGTNSVGWAVITDEYKVPSKKFKVLGNTDRHSIKKNLIGALLFDSGETAEATRLKRTARRRYTRRKNRICYLQEIFSNEMAKVDDSFFHRLEESFLVEEDKKHERHPIFGNIVDEVAYHEKYPTIYHLRKKLVDSTDKADLRLIYLALAHMIKFRGHFLIEGDLNPDNSDVDKLFIQLVQTYNQLFEENPINASGVDAKAILSARLSKSRRLENLIAQLPGEKKNGLFGNLIALSLGLTPNFKSNFDLAEDAKLQLSKDTYDDDLDNLLAQIGDQYADLFLAAKNLSDAILLSDILRVNTEITKAPLSASMIKRYDEHHQDLTLLKALVRQQLPEKYKEIFFDQSKNGYAGYIDGGASQEEFYKFIKPILEKMDGTEELLVKLNREDLLRKQRTFDNGSIPHQIHLGELHAILRRQEDFYPFLKDNREKIEKILTFRIPYYVGPLARGNSRFAWMTRKSEETITPWNFEEVVDKGASAQSFIERMTNFDKNLPNEKVLPKHSLLYEYFTVYNELTKVKYVTEGMRKPAFLSGEQKKAIVDLLFKTNRKVTVKQLKEDYFKKIECFDSVEISGVEDRFNASLGTYHDLLKIIKDKDFLDNEENEDILEDIVLTLTLFEDREMIEERLKTYAHLFDDKVMKQLKRRRYTGWGRLSRKLINGIRDKQSGKTILDFLKSDGFANRNFMQLIHDDSLTFKEDIQKAQVSGQGDSLHEHIANLAGSPAIKKGILQTVKVVDELVKVMGRHKPENIVIEMARENQTTQKGQKNSRERMKRIEEGIKELGSQILKEHPVENTQLQNEKLYLYYLQNGRDMYVDQELDINRLSDYDVDHIVPQSFLKDDSIDNKVLTRSDKNRGKSDNVPSEEVVKKMKNYWRQLLNAKLITQRKFDNLTKAERGGLSELDKAGFIKRQLVETRQITKHVAQILDSRMNTKYDENDKLIREVKVITLKSKLVSDFRKDFQFYKVREINNYHHAHDAYLNAVVGTALIKKYPKLESEFVYGDYKVYDVRKMIAKSEQEIGKATAKYFFYSNIMNFFKTEITLANGEIRKRPLIETNGEGSSGSETPGTSESATPESSGSEVEFSHEYWMRHALTLAKRARDEREVPVGAVLVLNNRVIGEGWNRAIGLHDPTAHAEIMALRQGGLVMQNYRLIDATLYVTFEPCVMCAGAMIHSRIGRVVFGVRNAKTGAAGSLMDVLHYPGMNHRVEITEGILADECAALLCYFFRMPRQVFNAQKKAQSSTDTGEIVWDKGRDFATVRKVLSMPQVNIVKKTEVQTGGFSKESILPKRNSDKLIARKKDWDPKKYGGFDSPTVAYSVLVVAKVEKGKSKKLKSVKELLGITIMERSSFEKNPIDFLEAKGYKEVKKDLIIKLPKYSLFELENGRKRMLASAGELQKGNELALPSKYVNFLYLASHYEKLKGSPEDNEQKQLFVEQHKHYLDEIIEQISEFSKRVILADANLDKVLSAYNKHRDKPIREQAENIIHLFTLTNLGAPAAFKYFDTTIDRKRYTSTKEVLDATLIHQSITGLYETRIDLSQLGGD

SEQ ID NO: 268 - protein, 1554 aa, synthetic construct
  REGION 1..1554: note = 106 Cas9 TadAins 1247 polypeptide sequence
MDKKYSIGLAIGTNSVGWAVITDEYKVPSKKFKVLGNTDRHSIKKNLIGALLFDSGETAEATRLKRTARRRYTRRKNRICYLQEIFSNEMAKVDDSFFHRLEESFLVEEDKKHERHPIFGNIVDEVAYHEKYPTIYHLRKKLVDSTDKADLRLIYLALAHMIKFRGHFLIEGDLNPDNSDVDKLFIQLVQTYNQLFEENPINASGVDAKAILSARLSKSRRLENLIAQLPGEKKNGLFGNLIALSLGLTPNFKSNFDLAEDAKLQLSKDTYDDDLDNLLAQIGDQYADLFLAAKNLSDAILLSDILRVNTEITKAPLSASMIKRYDEHHQDLTLLKALVRQQLPEKYKEIFFDQSKNGYAGYIDGGASQEEFYKFIKPILEKMDGTEELLVKLNREDLLRKQRTFDNGSIPHQIHLGELHAILRRQEDFYPFLKDNREKIEKILTFRIPYYVGPLARGNSRFAWMTRKSEETITPWNFEEVVDKGASAQSFIERMTNFDKNLPNEKVLPKHSLLYEYFTVYNELTKVKYVTEGMRKPAFLSGEQKKAIVDLLFKTNRKVTVKQLKEDYFKKIECFDSVEISGVEDRFNASLGTYHDLLKIIKDKDFLDNEENEDILEDIVLTLTLFEDREMIEERLKTYAHLFDDKVMKQLKRRRYTGWGRLSRKLINGIRDKQSGKTILDFLKSDGFANRNFMQLIHDDSLTFKEDIQKAQVSGQGDSLHEHIANLAGSPAIKKGILQTVKVVDELVKVMGRHKPENIVIEMARENQTTQKGQKNSRERMKRIEEGIKELGSQILKEHPVENTQLQNEKLYLYYLQNGRDMYVDQELDINRLSDYDVDHIVPQSFLKDDSIDNKVLTRSDKNRGKSDNVPSEEVVKKMKNYWRQLLNAKLITQRKFDNLTKAERGGLSELDKAGFIKRQLVETRQITKHVAQILDSRMNTKYDENDKLIREVKVITLKSKLVSDFRKDFQFYKVREINNYHHAHDAYLNAVVGTALIKKYPKLESEFVYGDYKVYDVRKMIAKSEQEIGKATAKYFFYSNIMNFFKTEITLANGEIRKRPLIETNGETGEIVWDKGRDFATVRKVLSMPQVNIVKKTEVQTGGFSKESILPKRNSDKLIARKKDWDPKKYGGFDSPTVAYSVLVVAKVEKGKSKKLKSVKELLGITIMERSSFEKNPIDFLEAKGYKEVKKDLIIKLPKYSLFELENGRKRMLASAGELQKGNELALPSKYVNFLYLASHYEKLKGGSSGSETPGTSESATPESSGSEVEFSHEYWMRHALTLAKRARDEREVPVGAVLVLNNRVIGEGWNRAIGLHDPTAHAEIMALRQGGLVMQNYRLIDATLYVTFEPCVMCAGAMIHSRIGRVVFGVRNAKTGAAGSLMDVLHYPGMNHRVEITEGILADECAALLCYFFRMPRQVFNAQKKAQSSTDSPEDNEQKQLFVEQHKHYLDEIIEQISEFSKRVILADANLDKVLSAYNKHRDKPIREQAENIIHLFTLTNLGAPAAFKYFDTTIDRKRYTSTKEVLDATLIHQSITGLYETRIDLSQLGGD

SEQ ID NO: 269 - protein, 1554 aa, synthetic construct
  REGION 1..1554: note = 107 Cas9 TadAins 1054 polypeptide sequence
MDKKYSIGLAIGTNSVGWAVITDEYKVPSKKFKVLGNTDRHSIKKNLIGALLFDSGETAEATRLKRTARRRYTRRKNRICYLQEIFSNEMAKVDDSFFHRLEESFLVEEDKKHERHPIFGNIVDEVAYHEKYPTIYHLRKKLVDSTDKADLRLIYLALAHMIKFRGHFLIEGDLNPDNSDVDKLFIQLVQTYNQLFEENPINASGVDAKAILSARLSKSRRLENLIAQLPGEKKNGLFGNLIALSLGLTPNFKSNFDLAEDAKLQLSKDTYDDDLDNLLAQIGDQYADLFLAAKNLSDAILLSDILRVNTEITKAPLSASMIKRYDEHHQDLTLLKALVRQQLPEKYKEIFFDQSKNGYAGYIDGGASQEEFYKFIKPILEKMDGTEELLVKLNREDLLRKQRTFDNGSIPHQIHLGELHAILRRQEDFYPFLKDNREKIEKILTFRIPYYVGPLARGNSRFAWMTRKSEETITPWNFEEVVDKGASAQSFIERMTNFDKNLPNEKVLPKHSLLYEYFTVYNELTKVKYVTEGMRKPAFLSGEQKKAIVDLLFKTNRKVTVKQLKEDYFKKIECFDSVEISGVEDRFNASLGTYHDLLKIIKDKDFLDNEENEDILEDIVLTLTLFEDREMIEERLKTYAHLFDDKVMKQLKRRRYTGWGRLSRKLINGIRDKQSGKTILDFLKSDGFANRNFMQLIHDDSLTFKEDIQKAQVSGQGDSLHEHIANLAGSPAIKKGILQTVKVVDELVKVMGRHKPENIVIEMARENQTTQKGQKNSRERMKRIEEGIKELGSQILKEHPVENTQLQNEKLYLYYLQNGRDMYVDQELDINRLSDYDVDHIVPQSFLKDDSIDNKVLTRSDKNRGKSDNVPSEEVVKKMKNYWRQLLNAKLITQRKFDNLTKAERGGLSELDKAGFIKRQLVETRQITKHVAQILDSRMNTKYDENDKLIREVKVITLKSKLVSDFRKDFQFYKVREINNYHHAHDAYLNAVVGTALIKKYPKLESEFVYGDYKVYDVRKMIAKSEQEIGKATAKYFFYSNIMNFFKTEITLANGSSGSETPGTSESATPESSGSEVEFSHEYWMRHALTLAKRARDEREVPVGAVLVLNNRVIGEGWNRAIGLHDPTAHAEIMALRQGGLVMQNYRLIDATLYVTFEPCVMCAGAMIHSRIGRVVFGVRNAKTGAAGSLMDVLHYPGMNHRVEITEGILADECAALLCYFFRMPRQVFNAQKKAQSSTDGEIRKRPLIETNGETGEIVWDKGRDFATVRKVLSMPQVNIVKKTEVQTGGFSKESILPKRNSDKLIARKKDWDPKKYGGFDSPTVAYSVLVVAKVEKGKSKKLKSVKELLGITIMERSSFEKNPIDFLEAKGYKEVKKDLIIKLPKYSLFELENGRKRMLASAGELQKGNELALPSKYVNFLYLASHYEKLKGSPEDNEQKQLFVEQHKHYLDEIIEQISEFSKRVILADANLDKVLSAYNKHRDKPIREQAENIIHLFTLTNLGAPAAFKYFDTTIDRKRYTSTKEVLDATLIHQSITGLYETRIDLSQLGGD

SEQ ID NO: 270 - protein, 1554 aa, synthetic construct
  REGION 1..1554: note = 108 Cas9 TadAins 1026 polypeptide sequence
MDKKYSIGLAIGTNSVGWAVITDEYKVPSKKFKVLGNTDRHSIKKNLIGALLFDSGETAEATRLKRTARRRYTRRKNRICYLQEIFSNEMAKVDDSFFHRLEESFLVEEDKKHERHPIFGNIVDEVAYHEKYPTIYHLRKKLVDSTDKADLRLIYLALAHMIKFRGHFLIEGDLNPDNSDVDKLFIQLVQTYNQLFEENPINASGVDAKAILSARLSKSRRLENLIAQLPGEKKNGLFGNLIALSLGLTPNFKSNFDLAEDAKLQLSKDTYDDDLDNLLAQIGDQYADLFLAAKNLSDAILLSDILRVNTEITKAPLSASMIKRYDEHHQDLTLLKALVRQQLPEKYKEIFFDQSKNGYAGYIDGGASQEEFYKFIKPILEKMDGTEELLVKLNREDLLRKQRTFDNGSIPHQIHLGELHAILRRQEDFYPFLKDNREKIEKILTFRIPYYVGPLARGNSRFAWMTRKSEETITPWNFEEVVDKGASAQSFIERMTNFDKNLPNEKVLPKHSLLYEYFTVYNELTKVKYVTEGMRKPAFLSGEQKKAIVDLLFKTNRKVTVKQLKEDYFKKIECFDSVEISGVEDRFNASLGTYHDLLKIIKDKDFLDNEENEDILEDIVLTLTLFEDREMIEERLKTYAHLFDDKVMKQLKRRRYTGWGRLSRKLINGIRDKQSGKTILDFLKSDGFANRNFMQLIHDDSLTFKEDIQKAQVSGQGDSLHEHIANLAGSPAIKKGILQTVKVVDELVKVMGRHKPENIVIEMARENQTTQKGQKNSRERMKRIEEGIKELGSQILKEHPVENTQLQNEKLYLYYLQNGRDMYVDQELDINRLSDYDVDHIVPQSFLKDDSIDNKVLTRSDKNRGKSDNVPSEEVVKKMKNYWRQLLNAKLITQRKFDNLTKAERGGLSELDKAGFIKRQLVETRQITKHVAQILDSRMNTKYDENDKLIREVKVITLKSKLVSDFRKDFQFYKVREINNYHHAHDAYLNAVVGTALIKKYPKLESEFVYGDYKVYDVRKMIAKSEGSSGSETPGTSESATPESSGSEVEFSHEYWMRHALTLAKRARDEREVPVGAVLVLNNRVIGEGWNRAIGLHDPTAHAEIMALRQGGLVMQNYRLIDATLYVTFEPCVMCAGAMIHSRIGRVVFGVRNAKTGAAGSLMDVLHYPGMNHRVEITEGILADECAALLCYFFRMPRQVFNAQKKAQSSTDQEIGKATAKYFFYSNIMNFFKTEITLANGEIRKRPLIETNGETGEIVWDKGRDFATVRKVLSMPQVNIVKKTEVQTGGFSKESILPKRNSDKLIARKKDWDPKKYGGFDSPTVAYSVLVVAKVEKGKSKKLKSVKELLGITIMERSSFEKNPIDFLEAKGYKEVKKDLIIKLPKYSLFELENGRKRMLASAGELQKGNELALPSKYVNFLYLASHYEKLKGSPEDNEQKQLFVEQHKHYLDEIIEQISEFSKRVILADANLDKVLSAYNKHRDKPIREQAENIIHLFTLTNLGAPAAFKYFDTTIDRKRYTSTKEVLDATLIHQSITGLYETRIDLSQLGGD

SEQ ID NO: 271 - protein, 1540 aa, synthetic construct
  REGION 1..1540: note = 109 Cas9 TadAins 768 polypeptide sequence
MDKKYSIGLAIGTNSVGWAVITDEYKVPSKKFKVLGNTDRHSIKKNLIGALLFDSGETAEATRLKRTARRRYTRRKNRICYLQEIFSNEMAKVDDSFFHRLEESFLVEEDKKHERHPIFGNIVDEVAYHEKYPTIYHLRKKLVDSTDKADLRLIYLALAHMIKFRGHFLIEGDLNPDNSDVDKLFIQLVQTYNQLFEENPINASGVDAKAILSARLSKSRRLENLIAQLPGEKKNGLFGNLIALSLGLTPNFKSNFDLAEDAKLQLSKDTYDDDLDNLLAQIGDQYADLFLAAKNLSDAILLSDILRVNTEITKAPLSASMIKRYDEHHQDLTLLKALVRQQLPEKYKEIFFDQSKNGYAGYIDGGASQEEFYKFIKPILEKMDGTEELLVKLNREDLLRKQRTFDNGSIPHQIHLGELHAILRRQEDFYPFLKDNREKIEKILTFRIPYYVGPLARGNSRFAWMTRKSEETITPWNFEEVVDKGASAQSFIERMTNFDKNLPNEKVLPKHSLLYEYFTVYNELTKVKYVTEGMRKPAFLSGEQKKAIVDLLFKTNRKVTVKQLKEDYFKKIECFDSVEISGVEDRFNASLGTYHDLLKIIKDKDFLDNEENEDILEDIVLTLTLFEDREMIEERLKTYAHLFDDKVMKQLKRRRYTGWGRLSRKLINGIRDKQSGKTILDFLKSDGFANRNFMQLIHDDSLTFKEDIQKAQVSGQGDSLHEHIANLAGSPAIKKGILQTVKVVDELVKVMGRHKPENIVIEMARENQGSSGSETPGTSESATPESSGSEVEFSHEYWMRHALTLAKRARDEREVPVGAVLVLNNRVIGEGWNRAIGLHDPTAHAEIMALRQGGLVMQNYRLIDATLYVTFEPCVMCAGAMIHSRIGRVVFGVRNAKTGAAGSLMDVLHYPGMNHRVEITEGILADECAALLCYFFRMPRTTQKGQKNSRERMKRIEEGIKELGSQILKEHPVENTQLQNEKLYLYYLQNGRDMYVDQELDINRLSDYDVDHIVPQSFLKDDSIDNKVLTRSDKNRGKSDNVPSEEVVKKMKNYWRQLLNAKLITQRKFDNLTKAERGGLSELDKAGFIKRQLVETRQITKHVAQILDSRMNTKYDENDKLIREVKVITLKSKLVSDFRKDFQFYKVREINNYHHAHDAYLNAVVGTALIKKYPKLESEFVYGDYKVYDVRKMIAKSEQEIGKATAKYFFYSNIMNFFKTEITLANGEIRKRPLIETNGETGEIVWDKGRDFATVRKVLSMPQVNIVKKTEVQTGGFSKESILPKRNSDKLIARKKDWDPKKYGGFDSPTVAYSVLVVAKVEKGKSKKLKSVKELLGITIMERSSFEKNPIDFLEAKGYKEVKKDLIIKLPKYSLFELENGRKRMLASAGELQKGNELALPSKYVNFLYLASHYEKLKGSPEDNEQKQLFVEQHKHYLDEIIEQISEFSKRVILADANLDKVLSAYNKHRDKPIREQAENIIHLFTLTNLGAPAAFKYFDTTIDRKRYTSTKEVLDATLIHQSITGLYETRIDLSQLGGD

SEQ ID NO: 272 - protein, 1540 aa, synthetic construct
  REGION 1..1540: note = 110.1 Cas9 TadAins 1250 polypeptide sequence
MDKKYSIGLAIGTNSVGWAVITDEYKVPSKKFKVLGNTDRHSIKKNLIGALLFDSGETAEATRLKRTARRRYTRRKNRICYLQEIFSNEMAKVDDSFFHRLEESFLVEEDKKHERHPIFGNIVDEVAYHEKYPTIYHLRKKLVDSTDKADLRLIYLALAHMIKFRGHFLIEGDLNPDNSDVDKLFIQLVQTYNQLFEENPINASGVDAKAILSARLSKSRRLENLIAQLPGEKKNGLFGNLIALSLGLTPNFKSNFDLAEDAKLQLSKDTYDDDLDNLLAQIGDQYADLFLAAKNLSDAILLSDILRVNTEITKAPLSASMIKRYDEHHQDLTLLKALVRQQLPEKYKEIFFDQSKNGYAGYIDGGASQEEFYKFIKPILEKMDGTEELLVKLNREDLLRKQRTFDNGSIPHQIHLGELHAILRRQEDFYPFLKDNREKIEKILTFRIPYYVGPLARGNSRFAWMTRKSEETITPWNFEEVVDKGASAQSFIERMTNFDKNLPNEKVLPKHSLLYEYFTVYNELTKVKYVTEGMRKPAFLSGEQKKAIVDLLFKTNRKVTVKQLKEDYFKKIECFDSVEISGVEDRFNASLGTYHDLLKIIKDKDFLDNEENEDILEDIVLTLTLFEDREMIEERLKTYAHLFDDKVMKQLKRRRYTGWGRLSRKLINGIRDKQSGKTILDFLKSDGFANRNFMQLIHDDSLTFKEDIQKAQVSGQGDSLHEHIANLAGSPAIKKGILQTVKVVDELVKVMGRHKPENIVIEMARENQTTQKGQKNSRERMKRIEEGIKELGSQILKEHPVENTQLQNEKLYLYYLQNGRDMYVDQELDINRLSDYDVDHIVPQSFLKDDSIDNKVLTRSDKNRGKSDNVPSEEVVKKMKNYWRQLLNAKLITQRKFDNLTKAERGGLSELDKAGFIKRQLVETRQITKHVAQILDSRMNTKYDENDKLIREVKVITLKSKLVSDFRKDFQFYKVREINNYHHAHDAYLNAVVGTALIKKYPKLESEFVYGDYKVYDVRKMIAKSEQEIGKATAKYFFYSNIMNFFKTEITLANGEIRKRPLIETNGETGEIVWDKGRDFATVRKVLSMPQVNIVKKTEVQTGGFSKESILPKRNSDKLIARKKDWDPKKYGGFDSPTVAYSVLVVAKVEKGKSKKLKSVKELLGITIMERSSFEKNPIDFLEAKGYKEVKKDLIIKLPKYSLFELENGRKRMLASAGELQKGNELALPSKYVNFLYLASHYEKLKGSPGSSGSETPGTSESATPESSGSEVEFSHEYWMRHALTLAKRARDEREVPVGAVLVLNNRVIGEGWNRAIGLHDPTAHAEIMALRQGGLVMQNYRLIDATLYVTFEPCVMCAGAMIHSRIGRVVFGVRNAKTGAAGSLMDVLHYPGMNHRVEITEGILADECAALLCYFFRMPREDNEQKQLFVEQHKHYLDEIIEQISEFSKRVILADANLDKVLSAYNKHRDKPIREQAENIIHLFTLTNLGAPAAFKYFDTTIDRKRYTSTKEVLDATLIHQSITGLYETRIDLSQLGGD

SEQ ID NO: 273 - protein, 1543 aa, synthetic construct
  REGION 1..1543: note = 110.2 Cas9 TadAins 1250 polypeptide sequence
MDKKYSIGLAIGTNSVGWAVITDEYKVPSKKFKVLGNTDRHSIKKNLIGALLFDSGETAEATRLKRTARRRYTRRKNRICYLQEIFSNEMAKVDDSFFHRLEESFLVEEDKKHERHPIFGNIVDEVAYHEKYPTIYHLRKKLVDSTDKADLRLIYLALAHMIKFRGHFLIEGDLNPDNSDVDKLFIQLVQTYNQLFEENPINASGVDAKAILSARLSKSRRLENLIAQLPGEKKNGLFGNLIALSLGLTPNFKSNFDLAEDAKLQLSKDTYDDDLDNLLAQIGDQYADLFLAAKNLSDAILLSDILRVNTEITKAPLSASMIKRYDEHHQDLTLLKALVRQQLPEKYKEIFFDQSKNGYAGYIDGGASQEEFYKFIKPILEKMDGTEELLVKLNREDLLRKQRTFDNGSIPHQIHLGELHAILRRQEDFYPFLKDNREKIEKILTFRIPYYVGPLARGNSRFAWMTRKSEETITPWNFEEVVDKGASAQSFIERMTNFDKNLPNEKVLPKHSLLYEYFTVYNELTKVKYVTEGMRKPAFLSGEQKKAIVDLLFKTNRKVTVKQLKEDYFKKIECFDSVEISGVEDRFNASLGTYHDLLKIIKDKDFLDNEENEDILEDIVLTLTLFEDREMIEERLKTYAHLFDDKVMKQLKRRRYTGWGRLSRKLINGIRDKQSGKTILDFLKSDGFANRNFMQLIHDDSLTFKEDIQKAQVSGQGDSLHEHIANLAGSPAIKKGILQTVKVVDELVKVMGRHKPENIVIEMARENQTTQKGQKNSRERMKRIEEGIKELGSQILKEHPVENTQLQNEKLYLYYLQNGRDMYVDQELDINRLSDYDVDHIVPQSFLKDDSIDNKVLTRSDKNRGKSDNVPSEEVVKKMKNYWRQLLNAKLITQRKFDNLTKAERGGLSELDKAGFIKRQLVETRQITKHVAQILDSRMNTKYDENDKLIREVKVITLKSKLVSDFRKDFQFYKVREINNYHHAHDAYLNAVVGTALIKKYPKLESEFVYGDYKVYDVRKMIAKSEQEIGKATAKYFFYSNIMNFFKTEITLANGEIRKRPLIETNGETGEIVWDKGRDFATVRKVLSMPQVNIVKKTEVQTGGFSKESILPKRNSDKLIARKKDWDPKKYGGFDSPTVAYSVLVVAKVEKGKSKKLKSVKELLGITIMERSSFEKNPIDFLEAKGYKEVKKDLIIKLPKYSLFELENGRKRMLASAGELQKGNELALPSKYVNFLYLASHYEKLKGSPGSSGSSGSETPGTSESATPESSGSEVEFSHEYWMRHALTLAKRARDEREVPVGAVLVLNNRVIGEGWNRAIGLHDPTAHAEIMALRQGGLVMQNYRLIDATLYVTFEPCVMCAGAMIHSRIGRVVFGVRNAKTGAAGSLMDVLHYPGMNHRVEITEGILADECAALLCYFFRMPREDNEQKQLFVEQHKHYLDEIIEQISEFSKRVILADANLDKVLSAYNKHRDKPIREQAENIIHLFTLTNLGAPAAFKYFDTTIDRKRYTSTKEVLDATLIHQSITGLYETRIDLSQLGGD

SEQ ID NO: 274 - protein, 1546 aa, synthetic construct
  REGION 1..1546: note = 110.3 Cas9 TadAins 1250 polypeptide sequence
MDKKYSIGLAIGTNSVGWAVITDEYKVPSKKFKVLGNTDRHSIKKNLIGALLFDSGETAEATRLKRTARRRYTRRKNRICYLQEIFSNEMAKVDDSFFHRLEESFLVEEDKKHERHPIFGNIVDEVAYHEKYPTIYHLRKKLVDSTDKADLRLIYLALAHMIKFRGHFLIEGDLNPDNSDVDKLFIQLVQTYNQLFEENPINASGVDAKAILSARLSKSRRLENLIAQLPGEKKNGLFGNLIALSLGLTPNFKSNFDLAEDAKLQLSKDTYDDDLDNLLAQIGDQYADLFLAAKNLSDAILLSDILRVNTEITKAPLSASMIKRYDEHHQDLTLLKALVRQQLPEKYKEIFFDQSKNGYAGYIDGGASQEEFYKFIKPILEKMDGTEELLVKLNREDLLRKQRTFDNGSIPHQIHLGELHAILRRQEDFYPFLKDNREKIEKILTFRIPYYVGPLARGNSRFAWMTRKSEETITPWNFEEVVDKGASAQSFIERMTNFDKNLPNEKVLPKHSLLYEYFTVYNELTKVKYVTEGMRKPAFLSGEQKKAIVDLLFKTNRKVTVKQLKEDYFKKIECFDSVEISGVEDRFNASLGTYHDLLKIIKDKDFLDNEENEDILEDIVLTLTLFEDREMIEERLKTYAHLFDDKVMKQLKRRRYTGWGRLSRKLINGIRDKQSGKTILDFLKSDGFANRNFMQLIHDDSLTFKEDIQKAQVSGQGDSLHEHIANLAGSPAIKKGILQTVKVVDELVKVMGRHKPENIVIEMARENQTTQKGQKNSRERMKRIEEGIKELGSQILKEHPVENTQLQNEKLYLYYLQNGRDMYVDQELDINRLSDYDVDHIVPQSFLKDDSIDNKVLTRSDKNRGKSDNVPSEEVVKKMKNYWRQLLNAKLITQRKFDNLTKAERGGLSELDKAGFIKRQLVETRQITKHVAQILDSRMNTKYDENDKLIREVKVITLKSKLVSDFRKDFQFYKVREINNYHHAHDAYLNAVVGTALIKKYPKLESEFVYGDYKVYDVRKMIAKSEQEIGKATAKYFFYSNIMNFFKTEITLANGEIRKRPLIETNGETGEIVWDKGRDFATVRKVLSMPQVNIVKKTEVQTGGFSKESILPKRNSDKLIARKKDWDPKKYGGFDSPTVAYSVLVVAKVEKGKSKKLKSVKELLGITIMERSSFEKNPIDFLEAKGYKEVKKDLIIKLPKYSLFELENGRKRMLASAGELQKGNELALPSKYVNFLYLASHYEKLKGSPGSSGSSGSETPGTSESATPESGSSSGSEVEFSHEYWMRHALTLAKRARDEREVPVGAVLVLNNRVIGEGWNRAIGLHDPTAHAEIMALRQGGLVMQNYRLIDATLYVTFEPCVMCAGAMIHSRIGRVVFGVRNAKTGAAGSLMDVLHYPGMNHRVEITEGILADECAALLCYFFRMPREDNEQKQLFVEQHKHYLDEIIEQISEFSKRVILADANLDKVLSAYNKHRDKPIREQAENIIHLFTLTNLGAPAAFKYFDTTIDRKRYTSTKEVLDATLIHQSITGLYETRIDLSQLGGD

SEQ ID NO: 275 - protein, 1546 aa, synthetic construct
  REGION 1..1546: note = 110.4 Cas9 TadAins 1250 polypeptide sequence
MDKKYSIGLAIGTNSVGWAVITDEYKVPSKKFKVLGNTDRHSIKKNLIGALLFDSGETAEATRLKRTARRRYTRRKNRICYLQEIFSNEMAKVDDSFFHRLEESFLVEEDKKHERHPIFGNIVDEVAYHEKYPTIYHLRKKLVDSTDKADLRLIYLALAHMIKFRGHFLIEGDLNPDNSDVDKLFIQLVQTYNQLFEENPINASGVDAKAILSARLSKSRRLENLIAQLPGEKKNGLFGNLIALSLGLTPNFKSNFDLAEDAKLQLSKDTYDDDLDNLLAQIGDQYADLFLAAKNLSDAILLSDILRVNTEITKAPLSASMIKRYDEHHQDLTLLKALVRQQLPEKYKEIFFDQSKNGYAGYIDGGASQEEFYKFIKPILEKMDGTEELLVKLNREDLLRKQRTFDNGSIPHQIHLGELHAILRRQEDFYPFLKDNREKIEKILTFRIPYYVGPLARGNSRFAWMTRKSEETITPWNFEEVVDKGASAQSFIERMTNFDKNLPNEKVLPKHSLLYEYFTVYNELTKVKYVTEGMRKPAFLSGEQKKAIVDLLFKTNRKVTVKQLKEDYFKKIECFDSVEISGVEDRFNASLGTYHDLLKIIKDKDFLDNEENEDILEDIVLTLTLFEDREMIEERLKTYAHLFDDKVMKQLKRRRYTGWGRLSRKLINGIRDKQSGKTILDFLKSDGFANRNFMQLIHDDSLTFKEDIQKAQVSGQGDSLHEHIANLAGSPAIKKGILQTVKVVDELVKVMGRHKPENIVIEMARENQTTQKGQKNSRERMKRIEEGIKELGSQILKEHPVENTQLQNEKLYLYYLQNGRDMYVDQELDINRLSDYDVDHIVPQSFLKDDSIDNKVLTRSDKNRGKSDNVPSEEVVKKMKNYWRQLLNAKLITQRKFDNLTKAERGGLSELDKAGFIKRQLVETRQITKHVAQILDSRMNTKYDENDKLIREVKVITLKSKLVSDFRKDFQFYKVREINNYHHAHDAYLNAVVGTALIKKYPKLESEFVYGDYKVYDVRKMIAKSEQEIGKATAKYFFYSNIMNFFKTEITLANGEIRKRPLIETNGETGEIVWDKGRDFATVRKVLSMPQVNIVKKTEVQTGGFSKESILPKRNSDKLIARKKDWDPKKYGGFDSPTVAYSVLVVAKVEKGKSKKLKSVKELLGITIMERSSFEKNPIDFLEAKGYKEVKKDLIIKLPKYSLFELENGRKRMLASAGELQKGNELALPSKYVNFLYLASHYEKLKGSPGSSGSSGSETPGTSESATPESGSSSGSEVEFSHEYWMRHALTLAKRARDEREVPVGAVLVLNNRVIGEGWNRAIGLHDPTAHAEIMALRQGGLVMQNYRLIDATLYVTFEPCVMCAGAMIHSRIGRVVFGVRNAKTGAAGSLMDVLHYPGMNHRVEITEGILADECAALLCYFFRMRREDNEQKQLFVEQHKHYLDEIIEQISEFSKRVILADANLDKVLSAYNKHRDKPIREQAENIIHLFTLTNLGAPAAFKYFDTTIDRKRYTSTKEVLDATLIHQSITGLYETRIDLSQLGGD

SEQ ID NO: 276 - protein, 1546 aa, synthetic construct
  REGION 1..1546: note = 110.5 Cas9 TadAins 1249 polypeptide sequence
MDKKYSIGLAIGTNSVGWAVITDEYKVPSKKFKVLGNTDRHSIKKNLIGALLFDSGETAEATRLKRTARRRYTRRKNRICYLQEIFSNEMAKVDDSFFHRLEESFLVEEDKKHERHPIFGNIVDEVAYHEKYPTIYHLRKKLVDSTDKADLRLIYLALAHMIKFRGHFLIEGDLNPDNSDVDKLFIQLVQTYNQLFEENPINASGVDAKAILSARLSKSRRLENLIAQLPGEKKNGLFGNLIALSLGLTPNFKSNFDLAEDAKLQLSKDTYDDDLDNLLAQIGDQYADLFLAAKNLSDAILLSDILRVNTEITKAPLSASMIKRYDEHHQDLTLLKALVRQQLPEKYKEIFFDQSKNGYAGYIDGGASQEEFYKFIKPILEKMDGTEELLVKLNREDLLRKQRTFDNGSIPHQIHLGELHAILRRQEDFYPFLKDNREKIEKILTFRIPYYVGPLARGNSRFAWMTRKSEETITPWNFEEVVDKGASAQSFIERMTNFDKNLPNEKVLPKHSLLYEYFTVYNELTKVKYVTEGMRKPAFLSGEQKKAIVDLLFKTNRKVTVKQLKEDYFKKIECFDSVEISGVEDRFNASLGTYHDLLKIIKDKDFLDNEENEDILEDIVLTLTLFEDREMIEERLKTYAHLFDDKVMKQLKRRRYTGWGRLSRKLINGIRDKQSGKTILDFLKSDGFANRNFMQLIHDDSLTFKEDIQKAQVSGQGDSLHEHIANLAGSPAIKKGILQTVKVVDELVKVMGRHKPENIVIEMARENQTTQKGQKNSRERMKRIEEGIKELGSQILKEHPVENTQLQNEKLYLYYLQNGRDMYVDQELDINRLSDYDVDHIVPQSFLKDDSIDNKVLTRSDKNRGKSDNVPSEEVVKKMKNYWRQLLNAKLITQRKFDNLTKAERGGLSELDKAGFIKRQLVETRQITKHVAQILDSRMNTKYDENDKLIREVKVITLKSKLVSDFRKDFQFYKVREINNYHHAHDAYLNAVVGTALIKKYPKLESEFVYGDYKVYDVRKMIAKSEQEIGKATAKYFFYSNIMNFFKTEITLANGEIRKRPLIETNGETGEIVWDKGRDFATVRKVLSMPQVNIVKKTEVQTGGFSKESILPKRNSDKLIARKKDWDPKKYGGFDSPTVAYSVLVVAKVEKGKSKKLKSVKELLGITIMERSSFEKNPIDFLEAKGYKEVKKDLIIKLPKYSLFELENGRKRMLASAGELQKGNELALPSKYVNFLYLASHYEKLKGSGSSGSSGSETPGTSESATPESGSSSGSEVEFSHEYWMRHALTLAKRARDEREVPVGAVLVLNNRVIGEGWNRAIGLHDPTAHAEIMALRQGGLVMQNYRLIDATLYVTFEPCVMCAGAMIHSRIGRVVFGVRNAKTGAAGSLMDVLHYPGMNHRVEITEGILADECAALLCYFFRMRRPEDNEQKQLFVEQHKHYLDEIIEQISEFSKRVILADANLDKVLSAYNKHRDKPIREQAENIIHLFTLTNLGAPAAFKYFDTTIDRKRYTSTKEVLDATLIHQSITGLYETRIDLSQLGGD

SEQ ID NO: 277 - protein, 1551 aa, synthetic construct
  REGION 1..1551: note = 110.5 Cas9 TadAins delta59-66 1250 polypeptide sequence
MDKKYSIGLAIGTNSVGWAVITDEYKVPSKKFKVLGNTDRHSIKKNLIGALLFDSGETAEATRLKRTARRRYTRRKNRICYLQEIFSNEMAKVDDSFFHRLEESFLVEEDKKHERHPIFGNIVDEVAYHEKYPTIYHLRKKLVDSTDKADLRLIYLALAHMIKFRGHFLIEGDLNPDNSDVDKLFIQLVQTYNQLFEENPINASGVDAKAILSARLSKSRRLENLIAQLPGEKKNGLFGNLIALSLGLTPNFKSNFDLAEDAKLQLSKDTYDDDLDNLLAQIGDQYADLFLAAKNLSDAILLSDILRVNTEITKAPLSASMIKRYDEHHQDLTLLKALVRQQLPEKYKEIFFDQSKNGYAGYIDGGASQEEFYKFIKPILEKMDGTEELLVKLNREDLLRKQRTFDNGSIPHQIHLGELHAILRRQEDFYPFLKDNREKIEKILTFRIPYYVGPLARGNSRFAWMTRKSEETITPWNFEEVVDKGASAQSFIERMTNFDKNLPNEKVLPKHSLLYEYFTVYNELTKVKYVTEGMRKPAFLSGEQKKAIVDLLFKTNRKVTVKQLKEDYFKKIECFDSVEISGVEDRFNASLGTYHDLLKIIKDKDFLDNEENEDILEDIVLTLTLFEDREMIEERLKTYAHLFDDKVMKQLKRRRYTGWGRLSRKLINGIRDKQSGKTILDFLKSDGFANRNFMQLIHDDSLTFKEDIQKAQVSGQGDSLHEHIANLAGSPAIKKGILQTVKVVDELVKVMGRHKPENIVIEMARENQTTQKGQKNSRERMKRIEEGIKELGSQILKEHPVENTQLQNEKLYLYYLQNGRDMYVDQELDINRLSDYDVDHIVPQSFLKDDSIDNKVLTRSDKNRGKSDNVPSEEVVKKMKNYWRQLLNAKLITQRKFDNLTKAERGGLSELDKAGFIKRQLVETRQITKHVAQILDSRMNTKYDENDKLIREVKVITLKSKLVSDFRKDFQFYKVREINNYHHAHDAYLNAVVGTALIKKYPKLESEFVYGDYKVYDVRKMIAKSEQEIGKATAKYFFYSNIMNFFKTEITLANGEIRKRPLIETNGETGEIVWDKGRDFATVRKVLSMPQVNIVKKTEVQTGGFSKESILPKRNSDKLIARKKDWDPKKYGGFDSPTVAYSVLVVAKVEKGKSKKLKSVKELLGITIMERSSFEKNPIDFLEAKGYKEVKKDLIIKLPKYSLFELENGRKRMLASAGELQKGNELALPSKYVNFLYLASHYEKLKGSPGSSGSSGSETPGTSESATPESGSSGSEVEFSHEYWMRHALTLAKRARDEREVPVGAVLVLNNRVIGEGWNRAHAEIMALRQGGLVMQNYRLIDATLYVTFEPCVMCAGAMIHSRIGRVVFGVRNAKTGAAGSLMDVLHYPGMNHRVEITEGILADECAALLCYFFRMPRQVFNAQKKAQSSTDEDNEQKQLFVEQHKHYLDEIIEQISEFSKRVILADANLDKVLSAYNKHRDKPIREQAENIIHLFTLTNLGAPAAFKYFDTTIDRKRYTSTKEVLDATLIHQSITGLYETRIDLSQLGGD

SEQ ID NO: 278 - protein, 1546 aa, synthetic construct
  REGION 1..1546: note = 110.6 Cas9 TadAins 1251 polypeptide sequence
MDKKYSIGLAIGTNSVGWAVITDEYKVPSKKFKVLGNTDRHSIKKNLIGALLFDSGETAEATRLKRTARRRYTRRKNRICYLQEIFSNEMAKVDDSFFHRLEESFLVEEDKKHERHPIFGNIVDEVAYHEKYPTIYHLRKKLVDSTDKADLRLIYLALAHMIKFRGHFLIEGDLNPDNSDVDKLFIQLVQTYNQLFEENPINASGVDAKAILSARLSKSRRLENLIAQLPGEKKNGLFGNLIALSLGLTPNFKSNFDLAEDAKLQLSKDTYDDDLDNLLAQIGDQYADLFLAAKNLSDAILLSDILRVNTEITKAPLSASMIKRYDEHHQDLTLLKALVRQQLPEKYKEIFFDQSKNGYAGYIDGGASQEEFYKFIKPILEKMDGTEELLVKLNREDLLRKQRTFDNGSIPHQIHLGELHAILRRQEDFYPFLKDNREKIEKILTFRIPYYVGPLARGNSRFAWMTRKSEETITPWNFEEVVDKGASAQSFIERMTNFDKNLPNEKVLPKHSLLYEYFTVYNELTKVKYVTEGMRKPAFLSGEQKKAIVDLLFKTNRKVTVKQLKEDYFKKIECFDSVEISGVEDRFNASLGTYHDLLKIIKDKDFLDNEENEDILEDIVLTLTLFEDREMIEERLKTYAHLFDDKVMKQLKRRRYTGWGRLSRKLINGIRDKQSGKTILDFLKSDGFANRNFMQLIHDDSLTFKEDIQKAQVSGQGDSLHEHIANLAGSPAIKKGILQTVKVVDELVKVMGRHKPENIVIEMARENQTTQKGQKNSRERMKRIEEGIKELGSQILKEHPVENTQLQNEKLYLYYLQNGRDMYVDQELDINRLSDYDVDHIVPQSFLKDDSIDNKVLTRSDKNRGKSDNVPSEEVVKKMKNYWRQLLNAKLITQRKFDNLTKAERGGLSELDKAGFIKRQLVETRQITKHVAQILDSRMNTKYDENDKLIREVKVITLKSKLVSDFRKDFQFYKVREINNYHHAHDAYLNAVVGTALIKKYPKLESEFVYGDYKVYDVRKMIAKSEQEIGKATAKYFFYSNIMNFFKTEITLANGEIRKRPLIETNGETGEIVWDKGRDFATVRKVLSMPQVNIVKKTEVQTGGFSKESILPKRNSDKLIARKKDWDPKKYGGFDSPTVAYSVLVVAKVEKGKSKKLKSVKELLGITIMERSSFEKNPIDFLEAKGYKEVKKDLIIKLPKYSLFELENGRKRMLASAGELQKGNELALPSKYVNFLYLASHYEKLKGSPEGSSGSSGSETPGTSESATPESGSSSGSEVEFSHEYWMRHALTLAKRARDEREVPVGAVLVLNNRVIGEGWNRAIGLHDPTAHAEIMALRQGGLVMQNYRLIDATLYVTFEPCVMCAGAMIHSRIGRVVFGVRNAKTGAAGSLMDVLHYPGMNHRVEITEGILADECAALLCYFFRMRRDNEQKQLFVEQHKHYLDEIIEQISEFSKRVILADANLDKVLSAYNKHRDKPIREQAENIIHLFTLTNLGAPAAFKYFDTTIDRKRYTSTKEVLDATLIHQSITGLYETRIDLSQLGGD

SEQ ID NO: 279 - protein, 1546 aa, synthetic construct
  REGION 1..1546: note = 110.7 Cas9 TadAins 1252 polypeptide sequence
MDKKYSIGLAIGTNSVGWAVITDEYKVPSKKFKVLGNTDRHSIKKNLIGALLFDSGETAEATRLKRTARRRYTRRKNRICYLQEIFSNEMAKVDDSFFHRLEESFLVEEDKKHERHPIFGNIVDEVAYHEKYPTIYHLRKKLVDSTDKADLRLIYLALAHMIKFRGHFLIEGDLNPDNSDVDKLFIQLVQTYNQLFEENPINASGVDAKAILSARLSKSRRLENLIAQLPGEKKNGLFGNLIALSLGLTPNFKSNFDLAEDAKLQLSKDTYDDDLDNLLAQIGDQYADLFLAAKNLSDAILLSDILRVNTEITKAPLSASMIKRYDEHHQDLTLLKALVRQQLPEKYKEIFFDQSKNGYAGYIDGGASQEEFYKFIKPILEKMDGTEELLVKLNREDLLRKQRTFDNGSIPHQIHLGELHAILRRQEDFYPFLKDNREKIEKILTFRIPYYVGPLARGNSRFAWMTRKSEETITPWNFEEVVDKGASAQSFIERMTNFDKNLPNEKVLPKHSLLYEYFTVYNELTKVKYVTEGMRKPAFLSGEQKKAIVDLLFKTNRKVTVKQLKEDYFKKIECFDSVEISGVEDRFNASLGTYHDLLKIIKDKDFLDNEENEDILEDIVLTLTLFEDREMIEERLKTYAHLFDDKVMKQLKRRRYTGWGRLSRKLINGIRDKQSGKTILDFLKSDGFANRNFMQLIHDDSLTFKEDIQKAQVSGQGDSLHEHIANLAGSPAIKKGILQTVKVVDELVKVMGRHKPENIVIEMARENQTTQKGQKNSRERMKRIEEGIKELGSQILKEHPVENTQLQNEKLYLYYLQNGRDMYVDQELDINRLSDYDVDHIVPQSFLKDDSIDNKVLTRSDKNRGKSDNVPSEEVVKKMKNYWRQLLNAKLITQRKFDNLTKAERGGLSELDKAGFIKRQLVETRQITKHVAQILDSRMNTKYDENDKLIREVKVITLKSKLVSDFRKDFQFYKVREINNYHHAHDAYLNAVVGTALIKKYPKLESEFVYGDYKVYDVRKMIAKSEQEIGKATAKYFFYSNIMNFFKTEITLANGEIRKRPLIETNGETGEIVWDKGRDFATVRKVLSMPQVNIVKKTEVQTGGFSKESILPKRNSDKLIARKKDWDPKKYGGFDSPTVAYSVLVVAKVEKGKSKKLKSVKELLGITIMERSSFEKNPIDFLEAKGYKEVKKDLIIKLPKYSLFELENGRKRMLASAGELQKGNELALPSKYVNFLYLASHYEKLKGSPEDGSSGSSGSETPGTSESATPESGSSSGSEVEFSHEYWMRHALTLAKRARDEREVPVGAVLVLNNRVIGEGWNRAIGLHDPTAHAEIMALRQGGLVMQNYRLIDATLYVTFEPCVMCAGAMIHSRIGRVVFGVRNAKTGAAGSLMDVLHYPGMNHRVEITEGILADECAALLCYFFRMRRNEQKQLFVEQHKHYLDEIIEQISEFSKRVILADANLDKVLSAYNKHRDKPIREQAENIIHLFTLTNLGAPAAFKYFDTTIDRKRYTSTKEVLDATLIHQSITGLYETRIDLSQLGGD

SEQ ID NO: 280 - protein, 1533 aa, synthetic construct
  REGION 1..1533: note = 110.8 Cas9 TadAins delta59-66 C-truncate 1250 polypeptide sequence
MDKKYSIGLAIGTNSVGWAVITDEYKVPSKKFKVLGNTDRHSIKKNLIGALLFDSGETAEATRLKRTARRRYTRRKNRICYLQEIFSNEMAKVDDSFFHRLEESFLVEEDKKHERHPIFGNIVDEVAYHEKYPTIYHLRKKLVDSTDKADLRLIYLALAHMIKFRGHFLIEGDLNPDNSDVDKLFIQLVQTYNQLFEENPINASGVDAKAILSARLSKSRRLENLIAQLPGEKKNGLFGNLIALSLGLTPNFKSNFDLAEDAKLQLSKDTYDDDLDNLLAQIGDQYADLFLAAKNLSDAILLSDILRVNTEITKAPLSASMIKRYDEHHQDLTLLKALVRQQLPEKYKEIFFDQSKNGYAGYIDGGASQEEFYKFIKPILEKMDGTEELLVKLNREDLLRKQRTFDNGSIPHQIHLGELHAILRRQEDFYPFLKDNREKIEKILTFRIPYYVGPLARGNSRFAWMTRKSEETITPWNFEEVVDKGASAQSFIERMTNFDKNLPNEKVLPKHSLLYEYFTVYNELTKVKYVTEGMRKPAFLSGEQKKAIVDLLFKTNRKVTVKQLKEDYFKKIECFDSVEISGVEDRFNASLGTYHDLLKIIKDKDFLDNEENEDILEDIVLTLTLFEDREMIEERLKTYAHLFDDKVMKQLKRRRYTGWGRLSRKLINGIRDKQSGKTILDFLKSDGFANRNFMQLIHDDSLTFKEDIQKAQVSGQGDSLHEHIANLAGSPAIKKGILQTVKVVDELVKVMGRHKPENIVIEMARENQTTQKGQKNSRERMKRIEEGIKELGSQILKEHPVENTQLQNEKLYLYYLQNGRDMYVDQELDINRLSDYDVDHIVPQSFLKDDSIDNKVLTRSDKNRGKSDNVPSEEVVKKMKNYWRQLLNAKLITQRKFDNLTKAERGGLSELDKAGFIKRQLVETRQITKHVAQILDSRMNTKYDENDKLIREVKVITLKSKLVSDFRKDFQFYKVREINNYHHAHDAYLNAVVGTALIKKYPKLESEFVYGDYKVYDVRKMIAKSEQEIGKATAKYFFYSNIMNFFKTEITLANGEIRKRPLIETNGETGEIVWDKGRDFATVRKVLSMPQVNIVKKTEVQTGGFSKESILPKRNSDKLIARKKDWDPKKYGGFDSPTVAYSVLVVAKVEKGKSKKLKSVKELLGITIMERSSFEKNPIDFLEAKGYKEVKKDLIIKLPKYSLFELENGRKRMLASAGELQKGNELALPSKYVNFLYLASHYEKLKGSPGSSGSETPGTSESATPESSGSEVEFSHEYWMRHALTLAKRARDEREVPVGAVLVLNNRVIGEGWNRAHAEIMALRQGGLVMQNYRLIDATLYVTFEPCVMCAGAMIHSRIGRVVFGVRNAKTGAAGSLMDVLHYPGMNHRVEITEGILADECAALLCYFFRMPRQEDNEQKQLFVEQHKHYLDEIIEQISEFSKRVILADANLDKVLSAYNKHRDKPIREQAENIIHLFTLTNLGAPAAFKYFDTTIDRKRYTSTKEVLDATLIHQSITGLYETRIDLSQLGGD

SEQ ID NO: 281 - protein, 1549 aa, synthetic construct
  REGION 1..1549: note = 111.1 Cas9 TadAins 997 polypeptide sequence
MDKKYSIGLAIGTNSVGWAVITDEYKVPSKKFKVLGNTDRHSIKKNLIGALLFDSGETAEATRLKRTARRRYTRRKNRICYLQEIFSNEMAKVDDSFFHRLEESFLVEEDKKHERHPIFGNIVDEVAYHEKYPTIYHLRKKLVDSTDKADLRLIYLALAHMIKFRGHFLIEGDLNPDNSDVDKLFIQLVQTYNQLFEENPINASGVDAKAILSARLSKSRRLENLIAQLPGEKKNGLFGNLIALSLGLTPNFKSNFDLAEDAKLQLSKDTYDDDLDNLLAQIGDQYADLFLAAKNLSDAILLSDILRVNTEITKAPLSASMIKRYDEHHQDLTLLKALVRQQLPEKYKEIFFDQSKNGYAGYIDGGASQEEFYKFIKPILEKMDGTEELLVKLNREDLLRKQRTFDNGSIPHQIHLGELHAILRRQEDFYPFLKDNREKIEKILTFRIPYYVGPLARGNSRFAWMTRKSEETITPWNFEEVVDKGASAQSFIERMTNFDKNLPNEKVLPKHSLLYEYFTVYNELTKVKYVTEGMRKPAFLSGEQKKAIVDLLFKTNRKVTVKQLKEDYFKKIECFDSVEISGVEDRFNASLGTYHDLLKIIKDKDFLDNEENEDILEDIVLTLTLFEDREMIEERLKTYAHLFDDKVMKQLKRRRYTGWGRLSRKLINGIRDKQSGKTILDFLKSDGFANRNFMQLIHDDSLTFKEDIQKAQVSGQGDSLHEHIANLAGSPAIKKGILQTVKVVDELVKVMGRHKPENIVIEMARENQTTQKGQKNSRERMKRIEEGIKELGSQILKEHPVENTQLQNEKLYLYYLQNGRDMYVDQELDINRLSDYDVDHIVPQSFLKDDSIDNKVLTRSDKNRGKSDNVPSEEVVKKMKNYWRQLLNAKLITQRKFDNLTKAERGGLSELDKAGFIKRQLVETRQITKHVAQILDSRMNTKYDENDKLIREVKVITLKSKLVSDFRKDFQFYKVREINNYHHAHDAYLNAVVGTALSHEYWMRHALTLAKRARDEREVPVGAVLVLNNRVIGEGWNRAIGLHDPTAHAEIMALRQGGLVMQNYRLIDATLYVTFEPCVMCAGAMIHSRIGRVVFGVRNAKTGAAGSLMDVLHYPGMNHRVEITEGILADECAALLCYFFRMPRQVFNAQKKAQSSTDGSSGSETPGTSESATPESSGIKKYPKLESEFVYGDYKVYDVRKMIAKSEQEIGKATAKYFFYSNIMNFFKTEITLANGEIRKRPLIETNGETGEIVWDKGRDFATVRKVLSMPQVNIVKKTEVQTGGFSKESILPKRNSDKLIARKKDWDPKKYGGFDSPTVAYSVLVVAKVEKGKSKKLKSVKELLGITIMERSSFEKNPIDFLEAKGYKEVKKDLIIKLPKYSLFELENGRKRMLASAGELQKGNELALPSKYVNFLYLASHYEKLKGSPEDNEQKQLFVEQHKHYLDEIIEQISEFSKRVILADANLDKVLSAYNKHRDKPIREQAENIIHLFTLTNLGAPAAFKYFDTTIDRKRYTSTKEVLDATLIHQSITGLYETRIDLSQLGGD

SEQ ID NO: 282 - protein, 1555 aa, synthetic construct
  REGION 1..1555: note = 111.2 Cas9 TadAins 997 polypeptide sequence
MDKKYSIGLAIGTNSVGWAVITDEYKVPSKKFKVLGNTDRHSIKKNLIGALLFDSGETAEATRLKRTARRRYTRRKNRICYLQEIFSNEMAKVDDSFFHRLEESFLVEEDKKHERHPIFGNIVDEVAYHEKYPTIYHLRKKLVDSTDKADLRLIYLALAHMIKFRGHFLIEGDLNPDNSDVDKLFIQLVQTYNQLFEENPINASGVDAKAILSARLSKSRRLENLIAQLPGEKKNGLFGNLIALSLGLTPNFKSNFDLAEDAKLQLSKDTYDDDLDNLLAQIGDQYADLFLAAKNLSDAILLSDILRVNTEITKAPLSASMIKRYDEHHQDLTLLKALVRQQLPEKYKEIFFDQSKNGYAGYIDGGASQEEFYKFIKPILEKMDGTEELLVKLNREDLLRKQRTFDNGSIPHQIHLGELHAILRRQEDFYPFLKDNREKIEKILTFRIPYYVGPLARGNSRFAWMTRKSEETITPWNFEEVVDKGASAQSFIERMTNFDKNLPNEKVLPKHSLLYEYFTVYNELTKVKYVTEGMRKPAFLSGEQKKAIVDLLFKTNRKVTVKQLKEDYFKKIECFDSVEISGVEDRFNASLGTYHDLLKIIKDKDFLDNEENEDILEDIVLTLTLFEDREMIEERLKTYAHLFDDKVMKQLKRRRYTGWGRLSRKLINGIRDKQSGKTILDFLKSDGFANRNFMQLIHDDSLTFKEDIQKAQVSGQGDSLHEHIANLAGSPAIKKGILQTVKVVDELVKVMGRHKPENIVIEMARENQTTQKGQKNSRERMKRIEEGIKELGSQILKEHPVENTQLQNEKLYLYYLQNGRDMYVDQELDINRLSDYDVDHIVPQSFLKDDSIDNKVLTRSDKNRGKSDNVPSEEVVKKMKNYWRQLLNAKLITQRKFDNLTKAERGGLSELDKAGFIKRQLVETRQITKHVAQILDSRMNTKYDENDKLIREVKVITLKSKLVSDFRKDFQFYKVREINNYHHAHDAYLNAVVGTALSHEYWMRHALTLAKRARDEREVPVGAVLVLNNRVIGEGWNRAIGLHDPTAHAEIMALRQGGLVMQNYRLIDATLYVTFEPCVMCAGAMIHSRIGRVVFGVRNAKTGAAGSLMDVLHYPGMNHRVEITEGILADECAALLCYFFRMPRQVFNAQKKAQSSTDGSSGSSGSETPGTSESATPESSGGSSIKKYPKLESEFVYGDYKVYDVRKMIAKSEQEIGKATAKYFFYSNIMNFFKTEITLANGEIRKRPLIETNGETGEIVWDKGRDFATVRKVLSMPQVNIVKKTEVQTGGFSKESILPKRNSDKLIARKKDWDPKKYGGFDSPTVAYSVLVVAKVEKGKSKKLKSVKELLGITIMERSSFEKNPIDFLEAKGYKEVKKDLIIKLPKYSLFELENGRKRMLASAGELQKGNELALPSKYVNFLYLASHYEKLKGSPEDNEQKQLFVEQHKHYLDEIIEQISEFSKRVILADANLDKVLSAYNKHRDKPIREQAENIIHLFTLTNLGAPAAFKYFDTTIDRKRYTSTKEVLDATLIHQSITGLYETRIDLSQLGGD

SEQ ID NO: 283 - protein, 1421 aa, synthetic construct
  REGION 1..1421: note = 112 delta HNH TadA polypeptide sequence
MDKKYSIGLAIGTNSVGWAVITDEYKVPSKKFKVLGNTDRHSIKKNLIGALLFDSGETAEATRLKRTARRRYTRRKNRICYLQEIFSNEMAKVDDSFFHRLEESFLVEEDKKHERHPIFGNIVDEVAYHEKYPTIYHLRKKLVDSTDKADLRLIYLALAHMIKFRGHFLIEGDLNPDNSDVDKLFIQLVQTYNQLFEENPINASGVDAKAILSARLSKSRRLENLIAQLPGEKKNGLFGNLIALSLGLTPNFKSNFDLAEDAKLQLSKDTYDDDLDNLLAQIGDQYADLFLAAKNLSDAILLSDILRVNTEITKAPLSASMIKRYDEHHQDLTLLKALVRQQLPEKYKEIFFDQSKNGYAGYIDGGASQEEFYKFIKPILEKMDGTEELLVKLNREDLLRKQRTFDNGSIPHQIHLGELHAILRRQEDFYPFLKDNREKIEKILTFRIPYYVGPLARGNSRFAWMTRKSEETITPWNFEEVVDKGASAQSFIERMTNFDKNLPNEKVLPKHSLLYEYFTVYNELTKVKYVTEGMRKPAFLSGEQKKAIVDLLFKTNRKVTVKQLKEDYFKKIECFDSVEISGVEDRFNASLGTYHDLLKIIKDKDFLDNEENEDILEDIVLTLTLFEDREMIEERLKTYAHLFDDKVMKQLKRRRYTGWGRLSRKLINGIRDKQSGKTILDFLKSDGFANRNFMQLIHDDSLTFKEDIQKAQVSGQGDSLHEHIANLAGSPAIKKGILQTVKVVDELVKVMGRHKPENIVIEMARENQTTQKGQKNSRERMKRIEEGIKELGSEVEFSHEYWMRHALTLAKRARDEREVPVGAVLVLNNRVIGEGWNRAIGLHDPTAHAEIMALRQGGLVMQNYRLIDATLYVTFEPCVMCAGAMIHSRIGRVVFGVRNAKTGAAGSLMDVLHYPGMNHRVEITEGILADECAALLCYFFRMPRQVFNAQKKAQSSTDGGLSELDKAGFIKRQLVETRQITKHVAQILDSRMNTKYDENDKLIREVKVITLKSKLVSDFRKDFQFYKVREINNYHHAHDAYLNAVVGTALIKKYPKLESEFVYGDYKVYDVRKMIAKSEQEIGKATAKYFFYSNIMNFFKTEITLANGEIRKRPLIETNGETGEIVWDKGRDFATVRKVLSMPQVNIVKKTEVQTGGFSKESILPKRNSDKLIARKKDWDPKKYGGFDSPTVAYSVLVVAKVEKGKSKKLKSVKELLGITIMERSSFEKNPIDFLEAKGYKEVKKDLIIKLPKYSLFELENGRKRMLASAGELQKGNELALPSKYVNFLYLASHYEKLKGSPEDNEQKQLFVEQHKHYLDEIIEQISEFSKRVILADANLDKVLSAYNKHRDKPIREQAENIIHLFTLTNLGAPAAFKYFDTTIDRKRYTSTKEVLDATLIHQSITGLYETRIDLSQLGGD

SEQ ID NO: 284 - protein, 1552 aa, synthetic construct
  REGION 1..1552: note = 113 N-term single TadA helixtrunc 165-end polypeptide sequence
MSEVEFSHEYWMRHALTLAKRARDEREVPVGAVLVLNNRVIGEGWNRAIGLHDPTAHAEIMALRQGGLVMQNYRLIDATLYVTFEPCVMCAGAMIHSRIGRVVFGVRNAKTGAAGSLMDVLHYPGMNHRVEITEGILADECAALLCYFFRMPRSGGSSGGSSGSETPGTSESATPESSGGSSGGSDKKYSIGLAIGTNSVGWAVITDEYKVPSKKFKVLGNTDRHSIKKNLIGALLFDSGETAEATRLKRTARRRYTRRKNRICYLQEIFSNEMAKVDDSFFHRLEESFLVEEDKKHERHPIFGNIVDEVAYHEKYPTIYHLRKKLVDSTDKADLRLIYLALAHMIKFRGHFLIEGDLNPDNSDVDKLFIQLVQTYNQLFEENPINASGVDAKAILSARLSKSRRLENLIAQLPGEKKNGLFGNLIALSLGLTPNFKSNFDLAEDAKLQLSKDTYDDDLDNLLAQIGDQYADLFLAAKNLSDAILLSDILRVNTEITKAPLSASMIKRYDEHHQDLTLLKALVRQQLPEKYKEIFFDQSKNGYAGYIDGGASQEEFYKFIKPILEKMDGTEELLVKLNREDLLRKQRTFDNGSIPHQIHLGELHAILRRQEDFYPFLKDNREKIEKILTFRIPYYVGPLARGNSRFAWMTRKSEETITPWNFEEVVDKGASAQSFIERMTNFDKNLPNEKVLPKHSLLYEYFTVYNELTKVKYVTEGMRKPAFLSGEQKKAIVDLLFKTNRKVTVKQLKEDYFKKIECFDSVEISGVEDRFNASLGTYHDLLKIIKDKDFLDNEENEDILEDIVLTLTLFEDREMIEERLKTYAHLFDDKVMKQLKRRRYTGWGRLSRKLINGIRDKQSGKTILDFLKSDGFANRNFMQLIHDDSLTFKEDIQKAQVSGQGDSLHEHIANLAGSPAIKKGILQTVKVVDELVKVMGRHKPENIVIEMARENQTTQKGQKNSRERMKRIEEGIKELGSQILKEHPVENTQLQNEKLYLYYLQNGRDMYVDQELDINRLSDYDVDHIVPQSFLKDDSIDNKVLTRSDKNRGKSDNVPSEEVVKKMKNYWRQLLNAKLITQRKFDNLTKAERGGLSELDKAGFIKRQLVETRQITKHVAQILDSRMNTKYDENDKLIREVKVITLKSKLVSDFRKDFQFYKVREINNYHHAHDAYLNAVVGTALIKKYPKLESEFVYGDYKVYDVRKMIAKSEQEIGKATAKYFFYSNIMNFFKTEITLANGEIRKRPLIETNGETGEIVWDKGRDFATVRKVLSMPQVNIVKKTEVQTGGFSKESILPKRNSDKLIARKKDWDPKKYGGFDSPTVAYSVLVVAKVEKGKSKKLKSVKELLGITIMERSSFEKNPIDFLEAKGYKEVKKDLIIKLPKYSLFELENGRKRMLASAGELQKGNELALPSKYVNFLYLASHYEKLKGSPEDNEQKQLFVEQHKHYLDEIIEQISEFSKRVILADANLDKVLSAYNKHRDKPIREQAENIIHLFTLTNLGAPAAFKYFDTTIDRKRYTSTKEVLDATLIHQSITGLYETRIDLSQLGGD

SEQ ID NO: 285 - protein, 1545 aa, synthetic construct
  REGION 1..1545: note = 114 N-term single TadA helixtrunc 165-end delta 59-65 polypeptide sequence
MSEVEFSHEYWMRHALTLAKRARDEREVPVGAVLVLNNRVIGEGWNRTAHAEIMALRQGGLVMQNYRLIDATLYVTFEPCVMCAGAMIHSRIGRVVFGVRNAKTGAAGSLMDVLHYPGMNHRVEITEGILADECAALLCYFFRMPRSGGSSGGSSGSETPGTSESATPESSGGSSGGSDKKYSIGLAIGTNSVGWAVITDEYKVPSKKFKVLGNTDRHSIKKNLIGALLFDSGETAEATRLKRTARRRYTRRKNRICYLQEIFSNEMAKVDDSFFHRLEESFLVEEDKKHERHPIFGNIVDEVAYHEKYPTIYHLRKKLVDSTDKADLRLIYLALAHMIKFRGHFLIEGDLNPDNSDVDKLFIQLVQTYNQLFEENPINASGVDAKAILSARLSKSRRLENLIAQLPGEKKNGLFGNLIALSLGLTPNFKSNFDLAEDAKLQLSKDTYDDDLDNLLAQIGDQYADLFLAAKNLSDAILLSDILRVNTEITKAPLSASMIKRYDEHHQDLTLLKALVRQQLPEKYKEIFFDQSKNGYAGYIDGGASQEEFYKFIKPILEKMDGTEELLVKLNREDLLRKQRTFDNGSIPHQIHLGELHAILRRQEDFYPFLKDNREKIEKILTFRIPYYVGPLARGNSRFAWMTRKSEETITPWNFEEVVDKGASAQSFIERMTNFDKNLPNEKVLPKHSLLYEYFTVYNELTKVKYVTEGMRKPAFLSGEQKKAIVDLLFKTNRKVTVKQLKEDYFKKIECFDSVEISGVEDRFNASLGTYHDLLKIIKDKDFLDNEENEDILEDIVLTLTLFEDREMIEERLKTYAHLFDDKVMKQLKRRRYTGWGRLSRKLINGIRDKQSGKTILDFLKSDGFANRNFMQLIHDDSLTFKEDIQKAQVSGQGDSLHEHIANLAGSPAIKKGILQTVKVVDELVKVMGRHKPENIVIEMARENQTTQKGQKNSRERMKRIEEGIKELGSQILKEHPVENTQLQNEKLYLYYLQNGRDMYVDQELDINRLSDYDVDHIVPQSFLKDDSIDNKVLTRSDKNRGKSDNVPSEEVVKKMKNYWRQLLNAKLITQRKFDNLTKAERGGLSELDKAGFIKRQLVETRQITKHVAQILDSRMNTKYDENDKLIREVKVITLKSKLVSDFRKDFQFYKVREINNYHHAHDAYLNAVVGTALIKKYPKLESEFVYGDYKVYDVRKMIAKSEQEIGKATAKYFFYSNIMNFFKTEITLANGEIRKRPLIETNGETGEIVWDKGRDFATVRKVLSMPQVNIVKKTEVQTGGFSKESILPKRNSDKLIARKKDWDPKKYGGFDSPTVAYSVLVVAKVEKGKSKKLKSVKELLGITIMERSSFEKNPIDFLEAKGYKEVKKDLIIKLPKYSLFELENGRKRMLASAGELQKGNELALPSKYVNFLYLASHYEKLKGSPEDNEQKQLFVEQHKHYLDEIIEQISEFSKRVILADANLDKVLSAYNKHRDKPIREQAENIIHLFTLTNLGAPAAFKYFDTTIDRKRYTSTKEVLDATLIHQSITGLYETRIDLSQLGGD

SEQ ID NO: 286 - protein, 1541 aa, synthetic construct
  REGION 1..1541: note = 115.1 Cas9 TadAins 1004 polypeptide sequence
MDKKYSIGLAIGTNSVGWAVITDEYKVPSKKFKVLGNTDRHSIKKNLIGALLFDSGETAEATRLKRTARRRYTRRKNRICYLQEIFSNEMAKVDDSFFHRLEESFLVEEDKKHERHPIFGNIVDEVAYHEKYPTIYHLRKKLVDSTDKADLRLIYLALAHMIKFRGHFLIEGDLNPDNSDVDKLFIQLVQTYNQLFEENPINASGVDAKAILSARLSKSRRLENLIAQLPGEKKNGLFGNLIALSLGLTPNFKSNFDLAEDAKLQLSKDTYDDDLDNLLAQIGDQYADLFLAAKNLSDAILLSDILRVNTEITKAPLSASMIKRYDEHHQDLTLLKALVRQQLPEKYKEIFFDQSKNGYAGYIDGGASQEEFYKFIKPILEKMDGTEELLVKLNREDLLRKQRTFDNGSIPHQIHLGELHAILRRQEDFYPFLKDNREKIEKILTFRIPYYVGPLARGNSRFAWMTRKSEETITPWNFEEVVDKGASAQSFIERMTNFDKNLPNEKVLPKHSLLYEYFTVYNELTKVKYVTEGMRKPAFLSGEQKKAIVDLLFKTNRKVTVKQLKEDYFKKIECFDSVEISGVEDRFNASLGTYHDLLKIIKDKDFLDNEENEDILEDIVLTLTLFEDREMIEERLKTYAHLFDDKVMKQLKRRRYTGWGRLSRKLINGIRDKQSGKTILDFLKSDGFANRNFMQLIHDDSLTFKEDIQKAQVSGQGDSLHEHIANLAGSPAIKKGILQTVKVVDELVKVMGRHKPENIVIEMARENQTTQKGQKNSRERMKRIEEGIKELGSQILKEHPVENTQLQNEKLYLYYLQNGRDMYVDQELDINRLSDYDVDHIVPQSFLKDDSIDNKVLTRSDKNRGKSDNVPSEEVVKKMKNYWRQLLNAKLITQRKFDNLTKAERGGLSELDKAGFIKRQLVETRQITKHVAQILDSRMNTKYDENDKLIREVKVITLKSKLVSDFRKDFQFYKVREINNYHHAHDAYLNAVVGTALIKKYPKGSSGSETPGTSESATPESSGSEVEFSHEYWMRHALTLAKRARDEREVPVGAVLVLNNRVIGEGWNRAIGLHDPTAHAEIMALRQGGLVMQNYRLIDATLYVTFEPCVMCAGAMIHSRIGRVVFGVRNAKTGAAGSLMDVLHYPGMNHRVEITEGILADECAALLCYFFRMPRQLESEFVYGDYKVYDVRKMIAKSEQEIGKATAKYFFYSNIMNFFKTEITLANGEIRKRPLIETNGETGEIVWDKGRDFATVRKVLSMPQVNIVKKTEVQTGGFSKESILPKRNSDKLIARKKDWDPKKYGGFDSPTVAYSVLVVAKVEKGKSKKLKSVKELLGITIMERSSFEKNPIDFLEAKGYKEVKKDLIIKLPKYSLFELENGRKRMLASAGELQKGNELALPSKYVNFLYLASHYEKLKGSPEDNEQKQLFVEQHKHYLDEIIEQISEFSKRVILADANLDKVLSAYNKHRDKPIREQAENIIHLFTLTNLGAPAAFKYFDTTIDRKRYTSTKEVLDATLIHQSITGLYETRIDLSQLGGD

SEQ ID NO: 287 - protein, 1541 aa, synthetic construct
  REGION 1..1541: note = 115.2 Cas9 TadAins 1005 polypeptide sequence
MDKKYSIGLAIGTNSVGWAVITDEYKVPSKKFKVLGNTDRHSIKKNLIGALLFDSGETAEATRLKRTARRRYTRRKNRICYLQEIFSNEMAKVDDSFFHRLEESFLVEEDKKHERHPIFGNIVDEVAYHEKYPTIYHLRKKLVDSTDKADLRLIYLALAHMIKFRGHFLIEGDLNPDNSDVDKLFIQLVQTYNQLFEENPINASGVDAKAILSARLSKSRRLENLIAQLPGEKKNGLFGNLIALSLGLTPNFKSNFDLAEDAKLQLSKDTYDDDLDNLLAQIGDQYADLFLAAKNLSDAILLSDILRVNTEITKAPLSASMIKRYDEHHQDLTLLKALVRQQLPEKYKEIFFDQSKNGYAGYIDGGASQEEFYKFIKPILEKMDGTEELLVKLNREDLLRKQRTFDNGSIPHQIHLGELHAILRRQEDFYPFLKDNREKIEKILTFRIPYYVGPLARGNSRFAWMTRKSEETITPWNFEEVVDKGASAQSFIERMTNFDKNLPNEKVLPKHSLLYEYFTVYNELTKVKYVTEGMRKPAFLSGEQKKAIVDLLFKTNRKVTVKQLKEDYFKKIECFDSVEISGVEDRFNASLGTYHDLLKIIKDKDFLDNEENEDILEDIVLTLTLFEDREMIEERLKTYAHLFDDKVMKQLKRRRYTGWGRLSRKLINGIRDKQSGKTILDFLKSDGFANRNFMQLIHDDSLTFKEDIQKAQVSGQGDSLHEHIANLAGSPAIKKGILQTVKVVDELVKVMGRHKPENIVIEMARENQTTQKGQKNSRERMKRIEEGIKELGSQILKEHPVENTQLQNEKLYLYYLQNGRDMYVDQELDINRLSDYDVDHIVPQSFLKDDSIDNKVLTRSDKNRGKSDNVPSEEVVKKMKNYWRQLLNAKLITQRKFDNLTKAERGGLSELDKAGFIKRQLVETRQITKHVAQILDSRMNTKYDENDKLIREVKVITLKSKLVSDFRKDFQFYKVREINNYHHAHDAYLNAVVGTALIKKYPKLGSSGSETPGTSESATPESSGSEVEFSHEYWMRHALTLAKRARDEREVPVGAVLVLNNRVIGEGWNRAIGLHDPTAHAEIMALRQGGLVMQNYRLIDATLYVTFEPCVMCAGAMIHSRIGRVVFGVRNAKTGAAGSLMDVLHYPGMNHRVEITEGILADECAALLCYFFRMPRQESEFVYGDYKVYDVRKMIAKSEQEIGKATAKYFFYSNIMNFFKTEITLANGEIRKRPLIETNGETGEIVWDKGRDFATVRKVLSMPQVNIVKKTEVQTGGFSKESILPKRNSDKLIARKKDWDPKKYGGFDSPTVAYSVLVVAKVEKGKSKKLKSVKELLGITIMERSSFEKNPIDFLEAKGYKEVKKDLIIKLPKYSLFELENGRKRMLASAGELQKGNELALPSKYVNFLYLASHYEKLKGSPEDNEQKQLFVEQHKHYLDEIIEQISEFSKRVILADANLDKVLSAYNKHRDKPIREQAENIIHLFTLTNLGAPAAFKYFDTTIDRKRYTSTKEVLDATLIHQSITGLYETRIDLSQLGGD

SEQ ID NO: 288 - protein, 1541 aa, synthetic construct
  REGION 1..1541: note = 115.3 Cas9 TadAins 1006 polypeptide sequence
MDKKYSIGLAIGTNSVGWAVITDEYKVPSKKFKVLGNTDRHSIKKNLIGALLFDSGETAEATRLKRTARRRYTRRKNRICYLQEIFSNEMAKVDDSFFHRLEESFLVEEDKKHERHPIFGNIVDEVAYHEKYPTIYHLRKKLVDSTDKADLRLIYLALAHMIKFRGHFLIEGDLNPDNSDVDKLFIQLVQTYNQLFEENPINASGVDAKAILSARLSKSRRLENLIAQLPGEKKNGLFGNLIALSLGLTPNFKSNFDLAEDAKLQLSKDTYDDDLDNLLAQIGDQYADLFLAAKNLSDAILLSDILRVNTEITKAPLSASMIKRYDEHHQDLTLLKALVRQQLPEKYKEIFFDQSKNGYAGYIDGGASQEEFYKFIKPILEKMDGTEELLVKLNREDLLRKQRTFDNGSIPHQIHLGELHAILRRQEDFYPFLKDNREKIEKILTFRIPYYVGPLARGNSRFAWMTRKSEETITPWNFEEVVDKGASAQSFIERMTNFDKNLPNEKVLPKHSLLYEYFTVYNELTKVKYVTEGMRKPAFLSGEQKKAIVDLLFKTNRKVTVKQLKEDYFKKIECFDSVEISGVEDRFNASLGTYHDLLKIIKDKDFLDNEENEDILEDIVLTLTLFEDREMIEERLKTYAHLFDDKVMKQLKRRRYTGWGRLSRKLINGIRDKQSGKTILDFLKSDGFANRNFMQLIHDDSLTFKEDIQKAQVSGQGDSLHEHIANLAGSPAIKKGILQTVKVVDELVKVMGRHKPENIVIEMARENQTTQKGQKNSRERMKRIEEGIKELGSQILKEHPVENTQLQNEKLYLYYLQNGRDMYVDQELDINRLSDYDVDHIVPQSFLKDDSIDNKVLTRSDKNRGKSDNVPSEEVVKKMKNYWRQLLNAKLITQRKFDNLTKAERGGLSELDKAGFIKRQLVETRQITKHVAQILDSRMNTKYDENDKLIREVKVITLKSKLVSDFRKDFQFYKVREINNYHHAHDAYLNAVVGTALIKKYPKLEGSSGSETPGTSESATPESSGSEVEFSHEYWMRHALTLAKRARDEREVPVGAVLVLNNRVIGEGWNRAIGLHDPTAHAEIMALRQGGLVMQNYRLIDATLYVTFEPCVMCAGAMIHSRIGRVVFGVRNAKTGAAGSLMDVLHYPGMNHRVEITEGILADECAALLCYFFRMPRQSEFVYGDYKVYDVRKMIAKSEQEIGKATAKYFFYSNIMNFFKTEITLANGEIRKRPLIETNGETGEIVWDKGRDFATVRKVLSMPQVNIVKKTEVQTGGFSKESILPKRNSDKLIARKKDWDPKKYGGFDSPTVAYSVLVVAKVEKGKSKKLKSVKELLGITIMERSSFEKNPIDFLEAKGYKEVKKDLIIKLPKYSLFELENGRKRMLASAGELQKGNELALPSKYVNFLYLASHYEKLKGSPEDNEQKQLFVEQHKHYLDEIIEQISEFSKRVILADANLDKVLSAYNKHRDKPIREQAENIIHLFTLTNLGAPAAFKYFDTTIDRKRYTSTKEVLDATLIHQSITGLYETRIDLSQLGGD

SEQ ID NO: 289 - protein, 1541 aa, synthetic construct
  REGION 1..1541: note = 115.4 Cas9 TadAins 1007 polypeptide sequence
MDKKYSIGLAIGTNSVGWAVITDEYKVPSKKFKVLGNTDRHSIKKNLIGALLFDSGETAEATRLKRTARRRYTRRKNRICYLQEIFSNEMAKVDDSFFHRLEESFLVEEDKKHERHPIFGNIVDEVAYHEKYPTIYHLRKKLVDSTDKADLRLIYLALAHMIKFRGHFLIEGDLNPDNSDVDKLFIQLVQTYNQLFEENPINASGVDAKAILSARLSKSRRLENLIAQLPGEKKNGLFGNLIALSLGLTPNFKSNFDLAEDAKLQLSKDTYDDDLDNLLAQIGDQYADLFLAAKNLSDAILLSDILRVNTEITKAPLSASMIKRYDEHHQDLTLLKALVRQQLPEKYKEIFFDQSKNGYAGYIDGGASQEEFYKFIKPILEKMDGTEELLVKLNREDLLRKQRTFDNGSIPHQIHLGELHAILRRQEDFYPFLKDNREKIEKILTFRIPYYVGPLARGNSRFAWMTRKSEETITPWNFEEVVDKGASAQSFIERMTNFDKNLPNEKVLPKHSLLYEYFTVYNELTKVKYVTEGMRKPAFLSGEQKKAIVDLLFKTNRKVTVKQLKEDYFKKIECFDSVEISGVEDRFNASLGTYHDLLKIIKDKDFLDNEENEDILEDIVLTLTLFEDREMIEERLKTYAHLFDDKVMKQLKRRRYTGWGRLSRKLINGIRDKQSGKTILDFLKSDGFANRNFMQLIHDDSLTFKEDIQKAQVSGQGDSLHEHIANLAGSPAIKKGILQTVKVVDELVKVMGRHKPENIVIEMARENQTTQKGQKNSRERMKRIEEGIKELGSQILKEHPVENTQLQNEKLYLYYLQNGRDMYVDQELDINRLSDYDVDHIVPQSFLKDDSIDNKVLTRSDKNRGKSDNVPSEEVVKKMKNYWRQLLNAKLITQRKFDNLTKAERGGLSELDKAGFIKRQLVETRQITKHVAQILDSRMNTKYDENDKLIREVKVITLKSKLVSDFRKDFQFYKVREINNYHHAHDAYLNAVVGTALIKKYPKLESGSSGSETPGTSESATPESSGSEVEFSHEYWMRHALTLAKRARDEREVPVGAVLVLNNRVIGEGWNRAIGLHDPTAHAEIMALRQGGLVMQNYRLIDATLYVTFEPCVMCAGAMIHSRIGRVVFGVRNAKTGAAGSLMDVLHYPGMNHRVEITEGILADECAALLCYFFRMPRQEFVYGDYKVYDVRKMIAKSEQEIGKATAKYFFYSNIMNFFKTEITLANGEIRKRPLIETNGETGEIVWDKGRDFATVRKVLSMPQVNIVKKTEVQTGGFSKESILPKRNSDKLIARKKDWDPKKYGGFDSPTVAYSVLVVAKVEKGKSKKLKSVKELLGITIMERSSFEKNPIDFLEAKGYKEVKKDLIIKLPKYSLFELENGRKRMLASAGELQKGNELALPSKYVNFLYLASHYEKLKGSPEDNEQKQLFVEQHKHYLDEIIEQISEFSKRVILADANLDKVLSAYNKHRDKPIREQAENIIHLFTLTNLGAPAAFKYFDTTIDRKRYTSTKEVLDATLIHQSITGLYETRIDLSQLGGD

SEQ ID NO: 290 - protein, 1541 aa, synthetic construct
  REGION 1..1541: note = 116.1 Cas9 TadAins C-term truncate 792 polypeptide sequence
MDKKYSIGLAIGTNSVGWAVITDEYKVPSKKFKVLGNTDRHSIKKNLIGALLFDSGETAEATRLKRTARRRYTRRKNRICYLQEIFSNEMAKVDDSFFHRLEESFLVEEDKKHERHPIFGNIVDEVAYHEKYPTIYHLRKKLVDSTDKADLRLIYLALAHMIKFRGHFLIEGDLNPDNSDVDKLFIQLVQTYNQLFEENPINASGVDAKAILSARLSKSRRLENLIAQLPGEKKNGLFGNLIALSLGLTPNFKSNFDLAEDAKLQLSKDTYDDDLDNLLAQIGDQYADLFLAAKNLSDAILLSDILRVNTEITKAPLSASMIKRYDEHHQDLTLLKALVRQQLPEKYKEIFFDQSKNGYAGYIDGGASQEEFYKFIKPILEKMDGTEELLVKLNREDLLRKQRTFDNGSIPHQIHLGELHAILRRQEDFYPFLKDNREKIEKILTFRIPYYVGPLARGNSRFAWMTRKSEETITPWNFEEVVDKGASAQSFIERMTNFDKNLPNEKVLPKHSLLYEYFTVYNELTKVKYVTEGMRKPAFLSGEQKKAIVDLLFKTNRKVTVKQLKEDYFKKIECFDSVEISGVEDRFNASLGTYHDLLKIIKDKDFLDNEENEDILEDIVLTLTLFEDREMIEERLKTYAHLFDDKVMKQLKRRRYTGWGRLSRKLINGIRDKQSGKTILDFLKSDGFANRNFMQLIHDDSLTFKEDIQKAQVSGQGDSLHEHIANLAGSPAIKKGILQTVKVVDELVKVMGRHKPENIVIEMARENQTTQKGQKNSRERMKRIEEGIKELGGSSGSETPGTSESATPESSGSEVEFSHEYWMRHALTLAKRARDEREVPVGAVLVLNNRVIGEGWNRAIGLHDPTAHAEIMALRQGGLVMQNYRLIDATLYVTFEPCVMCAGAMIHSRIGRVVFGVRNAKTGAAGSLMDVLHYPGMNHRVEITEGILADECAALLCYFFRMPRQSQILKEHPVENTQLQNEKLYLYYLQNGRDMYVDQELDINRLSDYDVDHIVPQSFLKDDSIDNKVLTRSDKNRGKSDNVPSEEVVKKMKNYWRQLLNAKLITQRKFDNLTKAERGGLSELDKAGFIKRQLVETRQITKHVAQILDSRMNTKYDENDKLIREVKVITLKSKLVSDFRKDFQFYKVREINNYHHAHDAYLNAVVGTALIKKYPKLESEFVYGDYKVYDVRKMIAKSEQEIGKATAKYFFYSNIMNFFKTEITLANGEIRKRPLIETNGETGEIVWDKGRDFATVRKVLSMPQVNIVKKTEVQTGGFSKESILPKRNSDKLIARKKDWDPKKYGGFDSPTVAYSVLVVAKVEKGKSKKLKSVKELLGITIMERSSFEKNPIDFLEAKGYKEVKKDLIIKLPKYSLFELENGRKRMLASAGELQKGNELALPSKYVNFLYLASHYEKLKGSPEDNEQKQLFVEQHKHYLDEIIEQISEFSKRVILADANLDKVLSAYNKHRDKPIREQAENIIHLFTLTNLGAPAAFKYFDTTIDRKRYTSTKEVLDATLIHQSITGLYETRIDLSQLGGD

SEQ ID NO: 291 - protein, 1541 aa, synthetic construct
  REGION 1..1541: note = 116.2 Cas9 TadAins C-term truncate 791 polypeptide sequence
MDKKYSIGLAIGTNSVGWAVITDEYKVPSKKFKVLGNTDRHSIKKNLIGALLFDSGETAEATRLKRTARRRYTRRKNRICYLQEIFSNEMAKVDDSFFHRLEESFLVEEDKKHERHPIFGNIVDEVAYHEKYPTIYHLRKKLVDSTDKADLRLIYLALAHMIKFRGHFLIEGDLNPDNSDVDKLFIQLVQTYNQLFEENPINASGVDAKAILSARLSKSRRLENLIAQLPGEKKNGLFGNLIALSLGLTPNFKSNFDLAEDAKLQLSKDTYDDDLDNLLAQIGDQYADLFLAAKNLSDAILLSDILRVNTEITKAPLSASMIKRYDEHHQDLTLLKALVRQQLPEKYKEIFFDQSKNGYAGYIDGGASQEEFYKFIKPILEKMDGTEELLVKLNREDLLRKQRTFDNGSIPHQIHLGELHAILRRQEDFYPFLKDNREKIEKILTFRIPYYVGPLARGNSRFAWMTRKSEETITPWNFEEVVDKGASAQSFIERMTNFDKNLPNEKVLPKHSLLYEYFTVYNELTKVKYVTEGMRKPAFLSGEQKKAIVDLLFKTNRKVTVKQLKEDYFKKIECFDSVEISGVEDRFNASLGTYHDLLKIIKDKDFLDNEENEDILEDIVLTLTLFEDREMIEERLKTYAHLFDDKVMKQLKRRRYTGWGRLSRKLINGIRDKQSGKTILDFLKSDGFANRNFMQLIHDDSLTFKEDIQKAQVSGQGDSLHEHIANLAGSPAIKKGILQTVKVVDELVKVMGRHKPENIVIEMARENQTTQKGQKNSRERMKRIEEGIKELGSSGSETPGTSESATPESSGSEVEFSHEYWMRHALTLAKRARDEREVPVGAVLVLNNRVIGEGWNRAIGLHDPTAHAEIMALRQGGLVMQNYRLIDATLYVTFEPCVMCAGAMIHSRIGRVVFGVRNAKTGAAGSLMDVLHYPGMNHRVEITEGILADECAALLCYFFRMPRQGSQILKEHPVENTQLQNEKLYLYYLQNGRDMYVDQELDINRLSDYDVDHIVPQSFLKDDSIDNKVLTRSDKNRGKSDNVPSEEVVKKMKNYWRQLLNAKLITQRKFDNLTKAERGGLSELDKAGFIKRQLVETRQITKHVAQILDSRMNTKYDENDKLIREVKVITLKSKLVSDFRKDFQFYKVREINNYHHAHDAYLNAVVGTALIKKYPKLESEFVYGDYKVYDVRKMIAKSEQEIGKATAKYFFYSNIMNFFKTEITLANGEIRKRPLIETNGETGEIVWDKGRDFATVRKVLSMPQVNIVKKTEVQTGGFSKESILPKRNSDKLIARKKDWDPKKYGGFDSPTVAYSVLVVAKVEKGKSKKLKSVKELLGITIMERSSFEKNPIDFLEAKGYKEVKKDLIIKLPKYSLFELENGRKRMLASAGELQKGNELALPSKYVNFLYLASHYEKLKGSPEDNEQKQLFVEQHKHYLDEIIEQISEFSKRVILADANLDKVLSAYNKHRDKPIREQAENIIHLFTLTNLGAPAAFKYFDTTIDRKRYTSTKEVLDATLIHQSITGLYETRIDLSQLGGD

SEQ ID NO: 292 - protein, 1541 aa, synthetic construct
  REGION 1..1541: note = 116.3 Cas9 TadAins C-term truncate 790 polypeptide sequence
MDKKYSIGLAIGTNSVGWAVITDEYKVPSKKFKVLGNTDRHSIKKNLIGALLFDSGETAEATRLKRTARRRYTRRKNRICYLQEIFSNEMAKVDDSFFHRLEESFLVEEDKKHERHPIFGNIVDEVAYHEKYPTIYHLRKKLVDSTDKADLRLIYLALAHMIKFRGHFLIEGDLNPDNSDVDKLFIQLVQTYNQLFEENPINASGVDAKAILSARLSKSRRLENLIAQLPGEKKNGLFGNLIALSLGLTPNFKSNFDLAEDAKLQLSKDTYDDDLDNLLAQIGDQYADLFLAAKNLSDAILLSDILRVNTEITKAPLSASMIKRYDEHHQDLTLLKALVRQQLPEKYKEIFFDQSKNGYAGYIDGGASQEEFYKFIKPILEKMDGTEELLVKLNREDLLRKQRTFDNGSIPHQIHLGELHAILRRQEDFYPFLKDNREKIEKILTFRIPYYVGPLARGNSRFAWMTRKSEETITPWNFEEVVDKGASAQSFIERMTNFDKNLPNEKVLPKHSLLYEYFTVYNELTKVKYVTEGMRKPAFLSGEQKKAIVDLLFKTNRKVTVKQLKEDYFKKIECFDSVEISGVEDRFNASLGTYHDLLKIIKDKDFLDNEENEDILEDIVLTLTLFEDREMIEERLKTYAHLFDDKVMKQLKRRRYTGWGRLSRKLINGIRDKQSGKTILDFLKSDGFANRNFMQLIHDDSLTFKEDIQKAQVSGQGDSLHEHIANLAGSPAIKKGILQTVKVVDELVKVMGRHKPENIVIEMARENQTTQKGQKNSRERMKRIEEGIKEGSSGSETPGTSESATPESSGSEVEFSHEYWMRHALTLAKRARDEREVPVGAVLVLNNRVIGEGWNRAIGLHDPTAHAEIMALRQGGLVMQNYRLIDATLYVTFEPCVMCAGAMIHSRIGRVVFGVRNAKTGAAGSLMDVLHYPGMNHRVEITEGILADECAALLCYFFRMPRQLGSQILKEHPVENTQLQNEKLYLYYLQNGRDMYVDQELDINRLSDYDVDHIVPQSFLKDDSIDNKVLTRSDKNRGKSDNVPSEEVVKKMKNYWRQLLNAKLITQRKFDNLTKAERGGLSELDKAGFIKRQLVETRQITKHVAQILDSRMNTKYDENDKLIREVKVITLKSKLVSDFRKDFQFYKVREINNYHHAHDAYLNAVVGTALIKKYPKLESEFVYGDYKVYDVRKMIAKSEQEIGKATAKYFFYSNIMNFFKTEITLANGEIRKRPLIETNGETGEIVWDKGRDFATVRKVLSMPQVNIVKKTEVQTGGFSKESILPKRNSDKLIARKKDWDPKKYGGFDSPTVAYSVLVVAKVEKGKSKKLKSVKELLGITIMERSSFEKNPIDFLEAKGYKEVKKDLIIKLPKYSLFELENGRKRMLASAGELQKGNELALPSKYVNFLYLASHYEKLKGSPEDNEQKQLFVEQHKHYLDEIIEQISEFSKRVILADANLDKVLSAYNKHRDKPIREQAENIIHLFTLTNLGAPAAFKYFDTTIDRKRYTSTKEVLDATLIHQSITGLYETRIDLSQLGGD

SEQ ID NO: 293 - protein, 1484 aa, synthetic construct
  REGION 1..1484: note = 117 Cas9 delta 1017-1069 polypeptide sequence
MDKKYSIGLAIGTNSVGWAVITDEYKVPSKKFKVLGNTDRHSIKKNLIGALLFDSGETAEATRLKRTARRRYTRRKNRICYLQEIFSNEMAKVDDSFFHRLEESFLVEEDKKHERHPIFGNIVDEVAYHEKYPTIYHLRKKLVDSTDKADLRLIYLALAHMIKFRGHFLIEGDLNPDNSDVDKLFIQLVQTYNQLFEENPINASGVDAKAILSARLSKSRRLENLIAQLPGEKKNGLFGNLIALSLGLTPNFKSNFDLAEDAKLQLSKDTYDDDLDNLLAQIGDQYADLFLAAKNLSDAILLSDILRVNTEITKAPLSASMIKRYDEHHQDLTLLKALVRQQLPEKYKEIFFDQSKNGYAGYIDGGASQEEFYKFIKPILEKMDGTEELLVKLNREDLLRKQRTFDNGSIPHQIHLGELHAILRRQEDFYPFLKDNREKIEKILTFRIPYYVGPLARGNSRFAWMTRKSEETITPWNFEEVVDKGASAQSFIERMTNFDKNLPNEKVLPKHSLLYEYFTVYNELTKVKYVTEGMRKPAFLSGEQKKAIVDLLFKTNRKVTVKQLKEDYFKKIECFDSVEISGVEDRFNASLGTYHDLLKIIKDKDFLDNEENEDILEDIVLTLTLFEDREMIEERLKTYAHLFDDKVMKQLKRRRYTGWGRLSRKLINGIRDKQSGKTILDFLKSDGFANRNFMQLIHDDSLTFKEDIQKAQVSGQGDSLHEHIANLAGSPAIKKGILQTVKVVDELVKVMGRHKPENIVIEMARENQTTQKGQKNSRERMKRIEEGIKELGSQILKEHPVENTQLQNEKLYLYYLQNGRDMYVDQELDINRLSDYDVDHIVPQSFLKDDSIDNKVLTRSDKNRGKSDNVPSEEVVKKMKNYWRQLLNAKLITQRKFDNLTKAERGGLSELDKAGFIKRQLVETRQITKHVAQILDSRMNTKYDENDKLIREVKVITLKSKLVSDFRKDFQFYKVREINNYHHAHDAYLNAVVGTALIKKYPKLESEFVYGDYKVYSSGSEVEFSHEYWMRHALTLAKRARDEREVPVGAVLVLNNRVIGEGWNRAIGLHDPTAHAEIMALRQGGLVMQNYRLIDATLYVTFEPCVMCAGAMIHSRIGRVVFGVRNAKTGAAGSLMDVLHYPGMNHRVEITEGILADECAALLCYFFRMPRQVFNAQKKAQSSTDGEIVWDKGRDFATVRKVLSMPQVNIVKKTEVQTGGFSKESILPKRNSDKLIARKKDWDPKKYGGFDSPTVAYSVLVVAKVEKGKSKKLKSVKELLGITIMERSSFEKNPIDFLEAKGYKEVKKDLIIKLPKYSLFELENGRKRMLASAGELQKGNELALPSKYVNFLYLASHYEKLKGSPEDNEQKQLFVEQHKHYLDEIIEQISEFSKRVILADANLDKVLSAYNKHRDKPIREQAENIIHLFTLTNLGAPAAFKYFDTTIDRKRYTSTKEVLDATLIHQSITGLYETRIDLSQLGGD

SEQ ID NO: 294 - protein, 1554 aa, synthetic construct
  REGION 1..1554: note = 118 Cas9 TadA-CP116ins 1067 polypeptide sequence
MDKKYSIGLAIGTNSVGWAVITDEYKVPSKKFKVLGNTDRHSIKKNLIGALLFDSGETAEATRLKRTARRRYTRRKNRICYLQEIFSNEMAKVDDSFFHRLEESFLVEEDKKHERHPIFGNIVDEVAYHEKYPTIYHLRKKLVDSTDKADLRLIYLALAHMIKFRGHFLIEGDLNPDNSDVDKLFIQLVQTYNQLFEENPINASGVDAKAILSARLSKSRRLENLIAQLPGEKKNGLFGNLIALSLGLTPNFKSNFDLAEDAKLQLSKDTYDDDLDNLLAQIGDQYADLFLAAKNLSDAILLSDILRVNTEITKAPLSASMIKRYDEHHQDLTLLKALVRQQLPEKYKEIFFDQSKNGYAGYIDGGASQEEFYKFIKPILEKMDGTEELLVKLNREDLLRKQRTFDNGSIPHQIHLGELHAILRRQEDFYPFLKDNREKIEKILTFRIPYYVGPLARGNSRFAWMTRKSEETITPWNFEEVVDKGASAQSFIERMTNFDKNLPNEKVLPKHSLLYEYFTVYNELTKVKYVTEGMRKPAFLSGEQKKAIVDLLFKTNRKVTVKQLKEDYFKKIECFDSVEISGVEDRFNASLGTYHDLLKIIKDKDFLDNEENEDILEDIVLTLTLFEDREMIEERLKTYAHLFDDKVMKQLKRRRYTGWGRLSRKLINGIRDKQSGKTILDFLKSDGFANRNFMQLIHDDSLTFKEDIQKAQVSGQGDSLHEHIANLAGSPAIKKGILQTVKVVDELVKVMGRHKPENIVIEMARENQTTQKGQKNSRERMKRIEEGIKELGSQILKEHPVENTQLQNEKLYLYYLQNGRDMYVDQELDINRLSDYDVDHIVPQSFLKDDSIDNKVLTRSDKNRGKSDNVPSEEVVKKMKNYWRQLLNAKLITQRKFDNLTKAERGGLSELDKAGFIKRQLVETRQITKHVAQILDSRMNTKYDENDKLIREVKVITLKSKLVSDFRKDFQFYKVREINNYHHAHDAYLNAVVGTALIKKYPKLESEFVYGDYKVYDVRKMIAKSEQEIGKATAKYFFYSNIMNFFKTEITLANGEIRKRPLIETNMNHRVEITEGILADECAALLCYFFRMPRQVFNAQKKAQSSTDGSSGSETPGTSESATPESSGSEVEFSHEYWMRHALTLAKRARDEREVPVGAVLVLNNRVIGEGWNRAIGLHDPTAHAEIMALRQGGLVMQNYRLIDATLYVTFEPCVMCAGAMIHSRIGRVVFGVRNAKTGAAGSLMDVLHYPGGETGEIVWDKGRDFATVRKVLSMPQVNIVKKTEVQTGGFSKESILPKRNSDKLIARKKDWDPKKYGGFDSPTVAYSVLVVAKVEKGKSKKLKSVKELLGITIMERSSFEKNPIDFLEAKGYKEVKKDLIIKLPKYSLFELENGRKRMLASAGELQKGNELALPSKYVNFLYLASHYEKLKGSPEDNEQKQLFVEQHKHYLDEIIEQISEFSKRVILADANLDKVLSAYNKHRDKPIREQAENIIHLFTLTNLGAPAAFKYFDTTIDRKRYTSTKEVLDATLIHQSITGLYETRIDLSQLGGD

SEQ ID NO: 295 - protein, 1554 aa, synthetic construct
  REGION 1..1554: note = 119 Cas9 TadAins 701 polypeptide sequence
MDKKYSIGLAIGTNSVGWAVITDEYKVPSKKFKVLGNTDRHSIKKNLIGALLFDSGETAEATRLKRTARRRYTRRKNRICYLQEIFSNEMAKVDDSFFHRLEESFLVEEDKKHERHPIFGNIVDEVAYHEKYPTIYHLRKKLVDSTDKADLRLIYLALAHMIKFRGHFLIEGDLNPDNSDVDKLFIQLVQTYNQLFEENPINASGVDAKAILSARLSKSRRLENLIAQLPGEKKNGLFGNLIALSLGLTPNFKSNFDLAEDAKLQLSKDTYDDDLDNLLAQIGDQYADLFLAAKNLSDAILLSDILRVNTEITKAPLSASMIKRYDEHHQDLTLLKALVRQQLPEKYKEIFFDQSKNGYAGYIDGGASQEEFYKFIKPILEKMDGTEELLVKLNREDLLRKQRTFDNGSIPHQIHLGELHAILRRQEDFYPFLKDNREKIEKILTFRIPYYVGPLARGNSRFAWMTRKSEETITPWNFEEVVDKGASAQSFIERMTNFDKNLPNEKVLPKHSLLYEYFTVYNELTKVKYVTEGMRKPAFLSGEQKKAIVDLLFKTNRKVTVKQLKEDYFKKIECFDSVEISGVEDRFNASLGTYHDLLKIIKDKDFLDNEENEDILEDIVLTLTLFEDREMIEERLKTYAHLFDDKVMKQLKRRRYTGWGRLSRKLINGIRDKQSGKTILDFLKSDGFANRNFMQLIHDDSGSSGSETPGTSESATPESSGSEVEFSHEYWMRHALTLAKRARDEREVPVGAVLVLNNRVIGEGWNRAIGLHDPTAHAEIMALRQGGLVMQNYRLIDATLYVTFEPCVMCAGAMIHSRIGRVVFGVRNAKTGAAGSLMDVLHYPGMNHRVEITEGILADECAALLCYFFRMPRQVFNAQKKAQSSTDLTFKEDIQKAQVSGQGDSLHEHIANLAGSPAIKKGILQTVKVVDELVKVMGRHKPENIVIEMARENQTTQKGQKNSRERMKRIEEGIKELGSQILKEHPVENTQLQNEKLYLYYLQNGRDMYVDQELDINRLSDYDVDHIVPQSFLKDDSIDNKVLTRSDKNRGKSDNVPSEEVVKKMKNYWRQLLNAKLITQRKFDNLTKAERGGLSELDKAGFIKRQLVETRQITKHVAQILDSRMNTKYDENDKLIREVKVITLKSKLVSDFRKDFQFYKVREINNYHHAHDAYLNAVVGTALIKKYPKLESEFVYGDYKVYDVRKMIAKSEQEIGKATAKYFFYSNIMNFFKTEITLANGEIRKRPLIETNGETGEIVWDKGRDFATVRKVLSMPQVNIVKKTEVQTGGFSKESILPKRNSDKLIARKKDWDPKKYGGFDSPTVAYSVLVVAKVEKGKSKKLKSVKELLGITIMERSSFEKNPIDFLEAKGYKEVKKDLIIKLPKYSLFELENGRKRMLASAGELQKGNELALPSKYVNFLYLASHYEKLKGSPEDNEQKQLFVEQHKHYLDEIIEQISEFSKRVILADANLDKVLSAYNKHRDKPIREQAENIIHLFTLTNLGAPAAFKYFDTTIDRKRYTSTKEVLDATLIHQSITGLYETRIDLSQLGGD

SEQ ID NO: 296 - protein, 1554 aa, synthetic construct
  REGION 1..1554: note = 120 Cas9 TadACP136ins 1248 polypeptide sequence
MDKKYSIGLAIGTNSVGWAVITDEYKVPSKKFKVLGNTDRHSIKKNLIGALLFDSGETAEATRLKRTARRRYTRRKNRICYLQEIFSNEMAKVDDSFFHRLEESFLVEEDKKHERHPIFGNIVDEVAYHEKYPTIYHLRKKLVDSTDKADLRLIYLALAHMIKFRGHFLIEGDLNPDNSDVDKLFIQLVQTYNQLFEENPINASGVDAKAILSARLSKSRRLENLIAQLPGEKKNGLFGNLIALSLGLTPNFKSNFDLAEDAKLQLSKDTYDDDLDNLLAQIGDQYADLFLAAKNLSDAILLSDILRVNTEITKAPLSASMIKRYDEHHQDLTLLKALVRQQLPEKYKEIFFDQSKNGYAGYIDGGASQEEFYKFIKPILEKMDGTEELLVKLNREDLLRKQRTFDNGSIPHQIHLGELHAILRRQEDFYPFLKDNREKIEKILTFRIPYYVGPLARGNSRFAWMTRKSEETITPWNFEEVVDKGASAQSFIERMTNFDKNLPNEKVLPKHSLLYEYFTVYNELTKVKYVTEGMRKPAFLSGEQKKAIVDLLFKTNRKVTVKQLKEDYFKKIECFDSVEISGVEDRFNASLGTYHDLLKIIKDKDFLDNEENEDILEDIVLTLTLFEDREMIEERLKTYAHLFDDKVMKQLKRRRYTGWGRLSRKLINGIRDKQSGKTILDFLKSDGFANRNFMQLIHDDSLTFKEDIQKAQVSGQGDSLHEHIANLAGSPAIKKGILQTVKVVDELVKVMGRHKPENIVIEMARENQTTQKGQKNSRERMKRIEEGIKELGSQILKEHPVENTQLQNEKLYLYYLQNGRDMYVDQELDINRLSDYDVDHIVPQSFLKDDSIDNKVLTRSDKNRGKSDNVPSEEVVKKMKNYWRQLLNAKLITQRKFDNLTKAERGGLSELDKAGFIKRQLVETRQITKHVAQILDSRMNTKYDENDKLIREVKVITLKSKLVSDFRKDFQFYKVREINNYHHAHDAYLNAVVGTALIKKYPKLESEFVYGDYKVYDVRKMIAKSEQEIGKATAKYFFYSNIMNFFKTEITLANGEIRKRPLIETNGETGEIVWDKGRDFATVRKVLSMPQVNIVKKTEVQTGGFSKESILPKRNSDKLIARKKDWDPKKYGGFDSPTVAYSVLVVAKVEKGKSKKLKSVKELLGITIMERSSFEKNPIDFLEAKGYKEVKKDLIIKLPKYSLFELENGRKRMLASAGELQKGNELALPSKYVNFLYLASHYEKLKGSMNHRVEITEGILADECAALLCYFFRMPRQVFNAQKKAQSSTDGSSGSETPGTSESATPESSGSEVEFSHEYWMRHALTLAKRARDEREVPVGAVLVLNNRVIGEGWNRAIGLHDPTAHAEIMALRQGGLVMQNYRLIDATLYVTFEPCVMCAGAMIHSRIGRVVFGVRNAKTGAAGSLMDVLHYPGPEDNEQKQLFVEQHKHYLDEIIEQISEFSKRVILADANLDKVLSAYNKHRDKPIREQAENIIHLFTLTNLGAPAAFKYFDTTIDRKRYTSTKEVLDATLIHQSITGLYETRIDLSQLGGD

SEQ ID NO: 297 - protein, 1554 aa, synthetic construct
  REGION 1..1554: note = 121 Cas9 TadACP136ins 1052 polypeptide sequence
MDKKYSIGLAIGTNSVGWAVITDEYKVPSKKFKVLGNTDRHSIKKNLIGALLFDSGETAEATRLKRTARRRYTRRKNRICYLQEIFSNEMAKVDDSFFHRLEESFLVEEDKKHERHPIFGNIVDEVAYHEKYPTIYHLRKKLVDSTDKADLRLIYLALAHMIKFRGHFLIEGDLNPDNSDVDKLFIQLVQTYNQLFEENPINASGVDAKAILSARLSKSRRLENLIAQLPGEKKNGLFGNLIALSLGLTPNFKSNFDLAEDAKLQLSKDTYDDDLDNLLAQIGDQYADLFLAAKNLSDAILLSDILRVNTEITKAPLSASMIKRYDEHHQDLTLLKALVRQQLPEKYKEIFFDQSKNGYAGYIDGGASQEEFYKFIKPILEKMDGTEELLVKLNREDLLRKQRTFDNGSIPHQIHLGELHAILRRQEDFYPFLKDNREKIEKILTFRIPYYVGPLARGNSRFAWMTRKSEETITPWNFEEVVDKGASAQSFIERMTNFDKNLPNEKVLPKHSLLYEYFTVYNELTKVKYVTEGMRKPAFLSGEQKKAIVDLLFKTNRKVTVKQLKEDYFKKIECFDSVEISGVEDRFNASLGTYHDLLKIIKDKDFLDNEENEDILEDIVLTLTLFEDREMIEERLKTYAHLFDDKVMKQLKRRRYTGWGRLSRKLINGIRDKQSGKTILDFLKSDGFANRNFMQLIHDDSLTFKEDIQKAQVSGQGDSLHEHIANLAGSPAIKKGILQTVKVVDELVKVMGRHKPENIVIEMARENQTTQKGQKNSRERMKRIEEGIKELGSQILKEHPVENTQLQNEKLYLYYLQNGRDMYVDQELDINRLSDYDVDHIVPQSFLKDDSIDNKVLTRSDKNRGKSDNVPSEEVVKKMKNYWRQLLNAKLITQRKFDNLTKAERGGLSELDKAGFIKRQLVETRQITKHVAQILDSRMNTKYDENDKLIREVKVITLKSKLVSDFRKDFQFYKVREINNYHHAHDAYLNAVVGTALIKKYPKLESEFVYGDYKVYDVRKMIAKSEQEIGKATAKYFFYSNIMNFFKTEITLAMNHRVEITEGILADECAALLCYFFRMPRQVFNAQKKAQSSTDGSSGSETPGTSESATPESSGSEVEFSHEYWMRHALTLAKRARDEREVPVGAVLVLNNRVIGEGWNRAIGLHDPTAHAEIMALRQGGLVMQNYRLIDATLYVTFEPCVMCAGAMIHSRIGRVVFGVRNAKTGAAGSLMDVLHYPGNGEIRKRPLIETNGETGEIVWDKGRDFATVRKVLSMPQVNIVKKTEVQTGGFSKESILPKRNSDKLIARKKDWDPKKYGGFDSPTVAYSVLVVAKVEKGKSKKLKSVKELLGITIMERSSFEKNPIDFLEAKGYKEVKKDLIIKLPKYSLFELENGRKRMLASAGELQKGNELALPSKYVNFLYLASHYEKLKGSPEDNEQKQLFVEQHKHYLDEIIEQISEFSKRVILADANLDKVLSAYNKHRDKPIREQAENIIHLFTLTNLGAPAAFKYFDTTIDRKRYTSTKEVLDATLIHQSITGLYETRIDLSQLGGD

SEQ ID NO: 298 - protein, 1554 aa, synthetic construct
  REGION 1..1554: note = 122 Cas9 TadACP136ins 1041 polypeptide sequence
MDKKYSIGLAIGTNSVGWAVITDEYKVPSKKFKVLGNTDRHSIKKNLIGALLFDSGETAEATRLKRTARRRYTRRKNRICYLQEIFSNEMAKVDDSFFHRLEESFLVEEDKKHERHPIFGNIVDEVAYHEKYPTIYHLRKKLVDSTDKADLRLIYLALAHMIKFRGHFLIEGDLNPDNSDVDKLFIQLVQTYNQLFEENPINASGVDAKAILSARLSKSRRLENLIAQLPGEKKNGLFGNLIALSLGLTPNFKSNFDLAEDAKLQLSKDTYDDDLDNLLAQIGDQYADLFLAAKNLSDAILLSDILRVNTEITKAPLSASMIKRYDEHHQDLTLLKALVRQQLPEKYKEIFFDQSKNGYAGYIDGGASQEEFYKFIKPILEKMDGTEELLVKLNREDLLRKQRTFDNGSIPHQIHLGELHAILRRQEDFYPFLKDNREKIEKILTFRIPYYVGPLARGNSRFAWMTRKSEETITPWNFEEVVDKGASAQSFIERMTNFDKNLPNEKVLPKHSLLYEYFTVYNELTKVKYVTEGMRKPAFLSGEQKKAIVDLLFKTNRKVTVKQLKEDYFKKIECFDSVEISGVEDRFNASLGTYHDLLKIIKDKDFLDNEENEDILEDIVLTLTLFEDREMIEERLKTYAHLFDDKVMKQLKRRRYTGWGRLSRKLINGIRDKQSGKTILDFLKSDGFANRNFMQLIHDDSLTFKEDIQKAQVSGQGDSLHEHIANLAGSPAIKKGILQTVKVVDELVKVMGRHKPENIVIEMARENQTTQKGQKNSRERMKRIEEGIKELGSQILKEHPVENTQLQNEKLYLYYLQNGRDMYVDQELDINRLSDYDVDHIVPQSFLKDDSIDNKVLTRSDKNRGKSDNVPSEEVVKKMKNYWRQLLNAKLITQRKFDNLTKAERGGLSELDKAGFIKRQLVETRQITKHVAQILDSRMNTKYDENDKLIREVKVITLKSKLVSDFRKDFQFYKVREINNYHHAHDAYLNAVVGTALIKKYPKLESEFVYGDYKVYDVRKMIAKSEQEIGKATAKYFFYSMNHRVEITEGILADECAALLCYFFRMPRQVFNAQKKAQSSTDGSSGSETPGTSESATPESSGSEVEFSHEYWMRHALTLAKRARDEREVPVGAVLVLNNRVIGEGWNRAIGLHDPTAHAEIMALRQGGLVMQNYRLIDATLYVTFEPCVMCAGAMIHSRIGRVVFGVRNAKTGAAGSLMDVLHYPGNIMNFFKTEITLANGEIRKRPLIETNGETGEIVWDKGRDFATVRKVLSMPQVNIVKKTEVQTGGFSKESILPKRNSDKLIARKKDWDPKKYGGFDSPTVAYSVLVVAKVEKGKSKKLKSVKELLGITIMERSSFEKNPIDFLEAKGYKEVKKDLIIKLPKYSLFELENGRKRMLASAGELQKGNELALPSKYVNFLYLASHYEKLKGSPEDNEQKQLFVEQHKHYLDEIIEQISEFSKRVILADANLDKVLSAYNKHRDKPIREQAENIIHLFTLTNLGAPAAFKYFDTTIDRKRYTSTKEVLDATLIHQSITGLYETRIDLSQLGGD

SEQ ID NO: 299 - protein, 1554 aa, synthetic construct
  REGION 1..1554: note = 123 Cas9 TadACP139ins 1299 polypeptide sequence
MDKKYSIGLAIGTNSVGWAVITDEYKVPSKKFKVLGNTDRHSIKKNLIGALLFDSGETAEATRLKRTARRRYTRRKNRICYLQEIFSNEMAKVDDSFFHRLEESFLVEEDKKHERHPIFGNIVDEVAYHEKYPTIYHLRKKLVDSTDKADLRLIYLALAHMIKFRGHFLIEGDLNPDNSDVDKLFIQLVQTYNQLFEENPINASGVDAKAILSARLSKSRRLENLIAQLPGEKKNGLFGNLIALSLGLTPNFKSNFDLAEDAKLQLSKDTYDDDLDNLLAQIGDQYADLFLAAKNLSDAILLSDILRVNTEITKAPLSASMIKRYDEHHQDLTLLKALVRQQLPEKYKEIFFDQSKNGYAGYIDGGASQEEFYKFIKPILEKMDGTEELLVKLNREDLLRKQRTFDNGSIPHQIHLGELHAILRRQEDFYPFLKDNREKIEKILTFRIPYYVGPLARGNSRFAWMTRKSEETITPWNFEEVVDKGASAQSFIERMTNFDKNLPNEKVLPKHSLLYEYFTVYNELTKVKYVTEGMRKPAFLSGEQKKAIVDLLFKTNRKVTVKQLKEDYFKKIECFDSVEISGVEDRFNASLGTYHDLLKIIKDKDFLDNEENEDILEDIVLTLTLFEDREMIEERLKTYAHLFDDKVMKQLKRRRYTGWGRLSRKLINGIRDKQSGKTILDFLKSDGFANRNFMQLIHDDSLTFKEDIQKAQVSGQGDSLHEHIANLAGSPAIKKGILQTVKVVDELVKVMGRHKPENIVIEMARENQTTQKGQKNSRERMKRIEEGIKELGSQILKEHPVENTQLQNEKLYLYYLQNGRDMYVDQELDINRLSDYDVDHIVPQSFLKDDSIDNKVLTRSDKNRGKSDNVPSEEVVKKMKNYWRQLLNAKLITQRKFDNLTKAERGGLSELDKAGFIKRQLVETRQITKHVAQILDSRMNTKYDENDKLIREVKVITLKSKLVSDFRKDFQFYKVREINNYHHAHDAYLNAVVGTALIKKYPKLESEFVYGDYKVYDVRKMIAKSEQEIGKATAKYFFYSNIMNFFKTEITLANGEIRKRPLIETNGETGEIVWDKGRDFATVRKVLSMPQVNIVKKTEVQTGGFSKESILPKRNSDKLIARKKDWDPKKYGGFDSPTVAYSVLVVAKVEKGKSKKLKSVKELLGITIMERSSFEKNPIDFLEAKGYKEVKKDLIIKLPKYSLFELENGRKRMLASAGELQKGNELALPSKYVNFLYLASHYEKLKGSPEDNEQKQLFVEQHKHYLDEIIEQISEFSKRVILADANLDKVLSAYNKHRMNHRVEITEGILADECAALLCYFFRMPRQVFNAQKKAQSSTDGSSGSETPGTSESATPESSGSEVEFSHEYWMRHALTLAKRARDEREVPVGAVLVLNNRVIGEGWNRAIGLHDPTAHAEIMALRQGGLVMQNYRLIDATLYVTFEPCVMCAGAMIHSRIGRVVFGVRNAKTGAAGSLMDVLHYPGDKPIREQAENIIHLFTLTNLGAPAAFKYFDTTIDRKRYTSTKEVLDATLIHQSITGLYETRIDLSQLGGD

SEQ ID NO: 300 - protein, 1454 aa, synthetic construct
  REGION 1..1454: note = 124 Cas9 delta 792-872TadAins polypeptide sequence
MDKKYSIGLAIGTNSVGWAVITDEYKVPSKKFKVLGNTDRHSIKKNLIGALLFDSGETAEATRLKRTARRRYTRRKNRICYLQEIFSNEMAKVDDSFFHRLEESFLVEEDKKHERHPIFGNIVDEVAYHEKYPTIYHLRKKLVDSTDKADLRLIYLALAHMIKFRGHFLIEGDLNPDNSDVDKLFIQLVQTYNQLFEENPINASGVDAKAILSARLSKSRRLENLIAQLPGEKKNGLFGNLIALSLGLTPNFKSNFDLAEDAKLQLSKDTYDDDLDNLLAQIGDQYADLFLAAKNLSDAILLSDILRVNTEITKAPLSASMIKRYDEHHQDLTLLKALVRQQLPEKYKEIFFDQSKNGYAGYIDGGASQEEFYKFIKPILEKMDGTEELLVKLNREDLLRKQRTFDNGSIPHQIHLGELHAILRRQEDFYPFLKDNREKIEKILTFRIPYYVGPLARGNSRFAWMTRKSEETITPWNFEEVVDKGASAQSFIERMTNFDKNLPNEKVLPKHSLLYEYFTVYNELTKVKYVTEGMRKPAFLSGEQKKAIVDLLFKTNRKVTVKQLKEDYFKKIECFDSVEISGVEDRFNASLGTYHDLLKIIKDKDFLDNEENEDILEDIVLTLTLFEDREMIEERLKTYAHLFDDKVMKQLKRRRYTGWGRLSRKLINGIRDKQSGKTILDFLKSDGFANRNFMQLIHDDSLTFKEDIQKAQVSGQGDSLHEHIANLAGSPAIKKGILQTVKVVDELVKVMGRHKPENIVIEMARENQTTQKGQKNSRERMKRIEEGIKELGSEVEFSHEYWMRHALTLAKRARDEREVPVGAVLVLNNRVIGEGWNRAIGLHDPTAHAEIMALRQGGLVMQNYRLIDATLYVTFEPCVMCAGAMIHSRIGRVVFGVRNAKTGAAGSLMDVLHYPGMNHRVEITEGILADECAALLCYFFRMPRQVFNAQKKAQSSTDEEVVKKMKNYWRQLLNAKLITQRKFDNLTKAERGGLSELDKAGFIKRQLVETRQITKHVAQILDSRMNTKYDENDKLIREVKVITLKSKLVSDFRKDFQFYKVREINNYHHAHDAYLNAVVGTALIKKYPKLESEFVYGDYKVYDVRKMIAKSEQEIGKATAKYFFYSNIMNFFKTEITLANGEIRKRPLIETNGETGEIVWDKGRDFATVRKVLSMPQVNIVKKTEVQTGGFSKESILPKRNSDKLIARKKDWDPKKYGGFDSPTVAYSVLVVAKVEKGKSKKLKSVKELLGITIMERSSFEKNPIDFLEAKGYKEVKKDLIIKLPKYSLFELENGRKRMLASAGELQKGNELALPSKYVNFLYLASHYEKLKGSPEDNEQKQLFVEQHKHYLDEIIEQISEFSKRVILADANLDKVLSAYNKHRDKPIREQAENIIHLFTLTNLGAPAAFKYFDTTIDRKRYTSTKEVLDATLIHQSITGLYETRIDLSQLGGD

SEQ ID NO: 301 - protein, 1420 aa, synthetic construct
  REGION 1..1420: note = 125 Cas9 delta 792-906TadAins polypeptide sequence
MDKKYSIGLAIGTNSVGWAVITDEYKVPSKKFKVLGNTDRHSIKKNLIGALLFDSGETAEATRLKRTARRRYTRRKNRICYLQEIFSNEMAKVDDSFFHRLEESFLVEEDKKHERHPIFGNIVDEVAYHEKYPTIYHLRKKLVDSTDKADLRLIYLALAHMIKFRGHFLIEGDLNPDNSDVDKLFIQLVQTYNQLFEENPINASGVDAKAILSARLSKSRRLENLIAQLPGEKKNGLFGNLIALSLGLTPNFKSNFDLAEDAKLQLSKDTYDDDLDNLLAQIGDQYADLFLAAKNLSDAILLSDILRVNTEITKAPLSASMIKRYDEHHQDLTLLKALVRQQLPEKYKEIFFDQSKNGYAGYIDGGASQEEFYKFIKPILEKMDGTEELLVKLNREDLLRKQRTFDNGSIPHQIHLGELHAILRRQEDFYPFLKDNREKIEKILTFRIPYYVGPLARGNSRFAWMTRKSEETITPWNFEEVVDKGASAQSFIERMTNFDKNLPNEKVLPKHSLLYEYFTVYNELTKVKYVTEGMRKPAFLSGEQKKAIVDLLFKTNRKVTVKQLKEDYFKKIECFDSVEISGVEDRFNASLGTYHDLLKIIKDKDFLDNEENEDILEDIVLTLTLFEDREMIEERLKTYAHLFDDKVMKQLKRRRYTGWGRLSRKLINGIRDKQSGKTILDFLKSDGFANRNFMQLIHDDSLTFKEDIQKAQVSGQGDSLHEHIANLAGSPAIKKGILQTVKVVDELVKVMGRHKPENIVIEMARENQTTQKGQKNSRERMKRIEEGIKELGSEVEFSHEYWMRHALTLAKRARDEREVPVGAVLVLNNRVIGEGWNRAIGLHDPTAHAEIMALRQGGLVMQNYRLIDATLYVTFEPCVMCAGAMIHSRIGRVVFGVRNAKTGAAGSLMDVLHYPGMNHRVEITEGILADECAALLCYFFRMPRQVFNAQKKAQSSTDGLSELDKAGFIKRQLVETRQITKHVAQILDSRMNTKYDENDKLIREVKVITLKSKLVSDFRKDFQFYKVREINNYHHAHDAYLNAVVGTALIKKYPKLESEFVYGDYKVYDVRKMIAKSEQEIGKATAKYFFYSNIMNFFKTEITLANGEIRKRPLIETNGETGEIVWDKGRDFATVRKVLSMPQVNIVKKTEVQTGGFSKESILPKRNSDKLIARKKDWDPKKYGGFDSPTVAYSVLVVAKVEKGKSKKLKSVKELLGITIMERSSFEKNPIDFLEAKGYKEVKKDLIIKLPKYSLFELENGRKRMLASAGELQKGNELALPSKYVNFLYLASHYEKLKGSPEDNEQKQLFVEQHKHYLDEIIEQISEFSKRVILADANLDKVLSAYNKHRDKPIREQAENIIHLFTLTNLGAPAAFKYFDTTIDRKRYTSTKEVLDATLIHQSITGLYETRIDLSQLGGD

SEQ ID NO: 302 - protein, 1554 aa, synthetic construct
  REGION 1..1554: note = 126 TadA CP65ins 1003 polypeptide sequence
MDKKYSIGLAIGTNSVGWAVITDEYKVPSKKFKVLGNTDRHSIKKNLIGALLFDSGETAEATRLKRTARRRYTRRKNRICYLQEIFSNEMAKVDDSFFHRLEESFLVEEDKKHERHPIFGNIVDEVAYHEKYPTIYHLRKKLVDSTDKADLRLIYLALAHMIKFRGHFLIEGDLNPDNSDVDKLFIQLVQTYNQLFEENPINASGVDAKAILSARLSKSRRLENLIAQLPGEKKNGLFGNLIALSLGLTPNFKSNFDLAEDAKLQLSKDTYDDDLDNLLAQIGDQYADLFLAAKNLSDAILLSDILRVNTEITKAPLSASMIKRYDEHHQDLTLLKALVRQQLPEKYKEIFFDQSKNGYAGYIDGGASQEEFYKFIKPILEKMDGTEELLVKLNREDLLRKQRTFDNGSIPHQIHLGELHAILRRQEDFYPFLKDNREKIEKILTFRIPYYVGPLARGNSRFAWMTRKSEETITPWNFEEVVDKGASAQSFIERMTNFDKNLPNEKVLPKHSLLYEYFTVYNELTKVKYVTEGMRKPAFLSGEQKKAIVDLLFKTNRKVTVKQLKEDYFKKIECFDSVEISGVEDRFNASLGTYHDLLKIIKDKDFLDNEENEDILEDIVLTLTLFEDREMIEERLKTYAHLFDDKVMKQLKRRRYTGWGRLSRKLINGIRDKQSGKTILDFLKSDGFANRNFMQLIHDDSLTFKEDIQKAQVSGQGDSLHEHIANLAGSPAIKKGILQTVKVVDELVKVMGRHKPENIVIEMARENQTTQKGQKNSRERMKRIEEGIKELGSQILKEHPVENTQLQNEKLYLYYLQNGRDMYVDQELDINRLSDYDVDHIVPQSFLKDDSIDNKVLTRSDKNRGKSDNVPSEEVVKKMKNYWRQLLNAKLITQRKFDNLTKAERGGLSELDKAGFIKRQLVETRQITKHVAQILDSRMNTKYDENDKLIREVKVITLKSKLVSDFRKDFQFYKVREINNYHHAHDAYLNAVVGTALIKKYPKTAHAEIMALRQGGLVMQNYRLIDATLYVTFEPCVMCAGAMIHSRIGRVVFGVRNAKTGAAGSLMDVLHYPGMNHRVEITEGILADECAALLCYFFRMPRQVFNAQKKAQSSTDGSSGSETPGTSESATPESSGSEVEFSHEYWMRHALTLAKRARDEREVPVGAVLVLNNRVIGEGWNRAIGLHDPLESEFVYGDYKVYDVRKMIAKSEQEIGKATAKYFFYSNIMNFFKTEITLANGEIRKRPLIETNGETGEIVWDKGRDFATVRKVLSMPQVNIVKKTEVQTGGFSKESILPKRNSDKLIARKKDWDPKKYGGFDSPTVAYSVLVVAKVEKGKSKKLKSVKELLGITIMERSSFEKNPIDFLEAKGYKEVKKDLIIKLPKYSLFELENGRKRMLASAGELQKGNELALPSKYVNFLYLASHYEKLKGSPEDNEQKQLFVEQHKHYLDEIIEQISEFSKRVILADANLDKVLSAYNKHRDKPIREQAENIIHLFTLTNLGAPAAFKYFDTTIDRKRYTSTKEVLDATLIHQSITGLYETRIDLSQLGGD

SEQ ID NO: 303 - protein, 1554 aa, synthetic construct
  REGION 1..1554: note = 127 TadA CP65ins 1016 polypeptide sequence
MDKKYSIGLAIGTNSVGWAVITDEYKVPSKKFKVLGNTDRHSIKKNLIGALLFDSGETAEATRLKRTARRRYTRRKNRICYLQEIFSNEMAKVDDSFFHRLEESFLVEEDKKHERHPIFGNIVDEVAYHEKYPTIYHLRKKLVDSTDKADLRLIYLALAHMIKFRGHFLIEGDLNPDNSDVDKLFIQLVQTYNQLFEENPINASGVDAKAILSARLSKSRRLENLIAQLPGEKKNGLFGNLIALSLGLTPNFKSNFDLAEDAKLQLSKDTYDDDLDNLLAQIGDQYADLFLAAKNLSDAILLSDILRVNTEITKAPLSASMIKRYDEHHQDLTLLKALVRQQLPEKYKEIFFDQSKNGYAGYIDGGASQEEFYKFIKPILEKMDGTEELLVKLNREDLLRKQRTFDNGSIPHQIHLGELHAILRRQEDFYPFLKDNREKIEKILTFRIPYYVGPLARGNSRFAWMTRKSEETITPWNFEEVVDKGASAQSFIERMTNFDKNLPNEKVLPKHSLLYEYFTVYNELTKVKYVTEGMRKPAFLSGEQKKAIVDLLFKTNRKVTVKQLKEDYFKKIECFDSVEISGVEDRFNASLGTYHDLLKIIKDKDFLDNEENEDILEDIVLTLTLFEDREMIEERLKTYAHLFDDKVMKQLKRRRYTGWGRLSRKLINGIRDKQSGKTILDFLKSDGFANRNFMQLIHDDSLTFKEDIQKAQVSGQGDSLHEHIANLAGSPAIKKGILQTVKVVDELVKVMGRHKPENIVIEMARENQTTQKGQKNSRERMKRIEEGIKELGSQILKEHPVENTQLQNEKLYLYYLQNGRDMYVDQELDINRLSDYDVDHIVPQSFLKDDSIDNKVLTRSDKNRGKSDNVPSEEVVKKMKNYWRQLLNAKLITQRKFDNLTKAERGGLSELDKAGFIKRQLVETRQITKHVAQILDSRMNTKYDENDKLIREVKVITLKSKLVSDFRKDFQFYKVREINNYHHAHDAYLNAVVGTALIKKYPKLESEFVYGDYKVTAHAEIMALRQGGLVMQNYRLIDATLYVTFEPCVMCAGAMIHSRIGRVVFGVRNAKTGAAGSLMDVLHYPGMNHRVEITEGILADECAALLCYFFRMPRQVFNAQKKAQSSTDGSSGSETPGTSESATPESSGSEVEFSHEYWMRHALTLAKRARDEREVPVGAVLVLNNRVIGEGWNRAIGLHDPYDVRKMIAKSEQEIGKATAKYFFYSNIMNFFKTEITLANGEIRKRPLIETNGETGEIVWDKGRDFATVRKVLSMPQVNIVKKTEVQTGGFSKESILPKRNSDKLIARKKDWDPKKYGGFDSPTVAYSVLVVAKVEKGKSKKLKSVKELLGITIMERSSFEKNPIDFLEAKGYKEVKKDLIIKLPKYSLFELENGRKRMLASAGELQKGNELALPSKYVNFLYLASHYEKLKGSPEDNEQKQLFVEQHKHYLDEIIEQISEFSKRVILADANLDKVLSAYNKHRDKPIREQAENIIHLFTLTNLGAPAAFKYFDTTIDRKRYTSTKEVLDATLIHQSITGLYETRIDLSQLGGD

SEQ ID NO: 304 - protein, 1554 aa, synthetic construct
  REGION 1..1554: note = 128 TadA CP65ins 1022 polypeptide sequence
MDKKYSIGLAIGTNSVGWAVITDEYKVPSKKFKVLGNTDRHSIKKNLIGALLFDSGETAEATRLKRTARRRYTRRKNRICYLQEIFSNEMAKVDDSFFHRLEESFLVEEDKKHERHPIFGNIVDEVAYHEKYPTIYHLRKKLVDSTDKADLRLIYLALAHMIKFRGHFLIEGDLNPDNSDVDKLFIQLVQTYNQLFEENPINASGVDAKAILSARLSKSRRLENLIAQLPGEKKNGLFGNLIALSLGLTPNFKSNFDLAEDAKLQLSKDTYDDDLDNLLAQIGDQYADLFLAAKNLSDAILLSDILRVNTEITKAPLSASMIKRYDEHHQDLTLLKALVRQQLPEKYKEIFFDQSKNGYAGYIDGGASQEEFYKFIKPILEKMDGTEELLVKLNREDLLRKQRTFDNGSIPHQIHLGELHAILRRQEDFYPFLKDNREKIEKILTFRIPYYVGPLARGNSRFAWMTRKSEETITPWNFEEVVDKGASAQSFIERMTNFDKNLPNEKVLPKHSLLYEYFTVYNELTKVKYVTEGMRKPAFLSGEQKKAIVDLLFKTNRKVTVKQLKEDYFKKIECFDSVEISGVEDRFNASLGTYHDLLKIIKDKDFLDNEENEDILEDIVLTLTLFEDREMIEERLKTYAHLFDDKVMKQLKRRRYTGWGRLSRKLINGIRDKQSGKTILDFLKSDGFANRNFMQLIHDDSLTFKEDIQKAQVSGQGDSLHEHIANLAGSPAIKKGILQTVKVVDELVKVMGRHKPENIVIEMARENQTTQKGQKNSRERMKRIEEGIKELGSQILKEHPVENTQLQNEKLYLYYLQNGRDMYVDQELDINRLSDYDVDHIVPQSFLKDDSIDNKVLTRSDKNRGKSDNVPSEEVVKKMKNYWRQLLNAKLITQRKFDNLTKAERGGLSELDKAGFIKRQLVETRQITKHVAQILDSRMNTKYDENDKLIREVKVITLKSKLVSDFRKDFQFYKVREINNYHHAHDAYLNAVVGTALIKKYPKLESEFVYGDYKVYDVRKMITAHAEIMALRQGGLVMQNYRLIDATLYVTFEPCVMCAGAMIHSRIGRVVFGVRNAKTGAAGSLMDVLHYPGMNHRVEITEGILADECAALLCYFFRMPRQVFNAQKKAQSSTDGSSGSETPGTSESATPESSGSEVEFSHEYWMRHALTLAKRARDEREVPVGAVLVLNNRVIGEGWNRAIGLHDPAKSEQEIGKATAKYFFYSNIMNFFKTEITLANGEIRKRPLIETNGETGEIVWDKGRDFATVRKVLSMPQVNIVKKTEVQTGGFSKESILPKRNSDKLIARKKDWDPKKYGGFDSPTVAYSVLVVAKVEKGKSKKLKSVKELLGITIMERSSFEKNPIDFLEAKGYKEVKKDLIIKLPKYSLFELENGRKRMLASAGELQKGNELALPSKYVNFLYLASHYEKLKGSPEDNEQKQLFVEQHKHYLDEIIEQISEFSKRVILADANLDKVLSAYNKHRDKPIREQAENIIHLFTLTNLGAPAAFKYFDTTIDRKRYTSTKEVLDATLIHQSITGLYETRIDLSQLGGD

SEQ ID NO: 305 - protein, 1554 aa, synthetic construct
  REGION 1..1554: note = 129 TadA CP65ins 1029 polypeptide sequence
MDKKYSIGLAIGTNSVGWAVITDEYKVPSKKFKVLGNTDRHSIKKNLIGALLFDSGETAEATRLKRTARRRYTRRKNRICYLQEIFSNEMAKVDDSFFHRLEESFLVEEDKKHERHPIFGNIVDEVAYHEKYPTIYHLRKKLVDSTDKADLRLIYLALAHMIKFRGHFLIEGDLNPDNSDVDKLFIQLVQTYNQLFEENPINASGVDAKAILSARLSKSRRLENLIAQLPGEKKNGLFGNLIALSLGLTPNFKSNFDLAEDAKLQLSKDTYDDDLDNLLAQIGDQYADLFLAAKNLSDAILLSDILRVNTEITKAPLSASMIKRYDEHHQDLTLLKALVRQQLPEKYKEIFFDQSKNGYAGYIDGGASQEEFYKFIKPILEKMDGTEELLVKLNREDLLRKQRTFDNGSIPHQIHLGELHAILRRQEDFYPFLKDNREKIEKILTFRIPYYVGPLARGNSRFAWMTRKSEETITPWNFEEVVDKGASAQSFIERMTNFDKNLPNEKVLPKHSLLYEYFTVYNELTKVKYVTEGMRKPAFLSGEQKKAIVDLLFKTNRKVTVKQLKEDYFKKIECFDSVEISGVEDRFNASLGTYHDLLKIIKDKDFLDNEENEDILEDIVLTLTLFEDREMIEERLKTYAHLFDDKVMKQLKRRRYTGWGRLSRKLINGIRDKQSGKTILDFLKSDGFANRNFMQLIHDDSLTFKEDIQKAQVSGQGDSLHEHIANLAGSPAIKKGILQTVKVVDELVKVMGRHKPENIVIEMARENQTTQKGQKNSRERMKRIEEGIKELGSQILKEHPVENTQLQNEKLYLYYLQNGRDMYVDQELDINRLSDYDVDHIVPQSFLKDDSIDNKVLTRSDKNRGKSDNVPSEEVVKKMKNYWRQLLNAKLITQRKFDNLTKAERGGLSELDKAGFIKRQLVETRQITKHVAQILDSRMNTKYDENDKLIREVKVITLKSKLVSDFRKDFQFYKVREINNYHHAHDAYLNAVVGTALIKKYPKLESEFVYGDYKVYDVRKMIAKSEQEITAHAEIMALRQGGLVMQNYRLIDATLYVTFEPCVMCAGAMIHSRIGRVVFGVRNAKTGAAGSLMDVLHYPGMNHRVEITEGILADECAALLCYFFRMPRQVFNAQKKAQSSTDGSSGSETPGTSESATPESSGSEVEFSHEYWMRHALTLAKRARDEREVPVGAVLVLNNRVIGEGWNRAIGLHDPGKATAKYFFYSNIMNFFKTEITLANGEIRKRPLIETNGETGEIVWDKGRDFATVRKVLSMPQVNIVKKTEVQTGGFSKESILPKRNSDKLIARKKDWDPKKYGGFDSPTVAYSVLVVAKVEKGKSKKLKSVKELLGITIMERSSFEKNPIDFLEAKGYKEVKKDLIIKLPKYSLFELENGRKRMLASAGELQKGNELALPSKYVNFLYLASHYEKLKGSPEDNEQKQLFVEQHKHYLDEIIEQISEFSKRVILADANLDKVLSAYNKHRDKPIREQAENIIHLFTLTNLGAPAAFKYFDTTIDRKRYTSTKEVLDATLIHQSITGLYETRIDLSQLGGD

SEQ ID NO: 306 - protein, 1554 aa, synthetic construct
  REGION 1..1554: note = 130 TadA CP65ins 1041 polypeptide sequence
MDKKYSIGLAIGTNSVGWAVITDEYKVPSKKFKVLGNTDRHSIKKNLIGALLFDSGETAEATRLKRTARRRYTRRKNRICYLQEIFSNEMAKVDDSFFHRLEESFLVEEDKKHERHPIFGNIVDEVAYHEKYPTIYHLRKKLVDSTDKADLRLIYLALAHMIKFRGHFLIEGDLNPDNSDVDKLFIQLVQTYNQLFEENPINASGVDAKAILSARLSKSRRLENLIAQLPGEKKNGLFGNLIALSLGLTPNFKSNFDLAEDAKLQLSKDTYDDDLDNLLAQIGDQYADLFLAAKNLSDAILLSDILRVNTEITKAPLSASMIKRYDEHHQDLTLLKALVRQQLPEKYKEIFFDQSKNGYAGYIDGGASQEEFYKFIKPILEKMDGTEELLVKLNREDLLRKQRTFDNGSIPHQIHLGELHAILRRQEDFYPFLKDNREKIEKILTFRIPYYVGPLARGNSRFAWMTRKSEETITPWNFEEVVDKGASAQSFIERMTNFDKNLPNEKVLPKHSLLYEYFTVYNELTKVKYVTEGMRKPAFLSGEQKKAIVDLLFKTNRKVTVKQLKEDYFKKIECFDSVEISGVEDRFNASLGTYHDLLKIIKDKDFLDNEENEDILEDIVLTLTLFEDREMIEERLKTYAHLFDDKVMKQLKRRRYTGWGRLSRKLINGIRDKQSGKTILDFLKSDGFANRNFMQLIHDDSLTFKEDIQKAQVSGQGDSLHEHIANLAGSPAIKKGILQTVKVVDELVKVMGRHKPENIVIEMARENQTTQKGQKNSRERMKRIEEGIKELGSQILKEHPVENTQLQNEKLYLYYLQNGRDMYVDQELDINRLSDYDVDHIVPQSFLKDDSIDNKVLTRSDKNRGKSDNVPSEEVVKKMKNYWRQLLNAKLITQRKFDNLTKAERGGLSELDKAGFIKRQLVETRQITKHVAQILDSRMNTKYDENDKLIREVKVITLKSKLVSDFRKDFQFYKVREINNYHHAHDAYLNAVVGTALIKKYPKLESEFVYGDYKVYDVRKMIAKSEQEIGKATAKYFFYSTAHAEIMALRQGGLVMQNYRLIDATLYVTFEPCVMCAGAMIHSRIGRVVFGVRNAKTGAAGSLMDVLHYPGMNHRVEITEGILADECAALLCYFFRMPRQVFNAQKKAQSSTDGSSGSETPGTSESATPESSGSEVEFSHEYWMRHALTLAKRARDEREVPVGAVLVLNNRVIGEGWNRAIGLHDPNIMNFFKTEITLANGEIRKRPLIETNGETGEIVWDKGRDFATVRKVLSMPQVNIVKKTEVQTGGFSKESILPKRNSDKLIARKKDWDPKKYGGFDSPTVAYSVLVVAKVEKGKSKKLKSVKELLGITIMERSSFEKNPIDFLEAKGYKEVKKDLIIKLPKYSLFELENGRKRMLASAGELQKGNELALPSKYVNFLYLASHYEKLKGSPEDNEQKQLFVEQHKHYLDEIIEQISEFSKRVILADANLDKVLSAYNKHRDKPIREQAENIIHLFTLTNLGAPAAFKYFDTTIDRKRYTSTKEVLDATLIHQSITGLYETRIDLSQLGGD

SEQ ID NO: 307 - protein, 1554 aa, synthetic construct
  REGION 1..1554: note = 131 TadA CP65ins 1054 polypeptide sequence
MDKKYSIGLAIGTNSVGWAVITDEYKVPSKKFKVLGNTDRHSIKKNLIGALLFDSGETAEATRLKRTARRRYTRRKNRICYLQEIFSNEMAKVDDSFFHRLEESFLVEEDKKHERHPIFGNIVDEVAYHEKYPTIYHLRKKLVDSTDKADLRLIYLALAHMIKFRGHFLIEGDLNPDNSDVDKLFIQLVQTYNQLFEENPINASGVDAKAILSARLSKSRRLENLIAQLPGEKKNGLFGNLIALSLGLTPNFKSNFDLAEDAKLQLSKDTYDDDLDNLLAQIGDQYADLFLAAKNLSDAILLSDILRVNTEITKAPLSASMIKRYDEHHQDLTLLKALVRQQLPEKYKEIFFDQSKNGYAGYIDGGASQEEFYKFIKPILEKMDGTEELLVKLNREDLLRKQRTFDNGSIPHQIHLGELHAILRRQEDFYPFLKDNREKIEKILTFRIPYYVGPLARGNSRFAWMTRKSEETITPWNFEEVVDKGASAQSFIERMTNFDKNLPNEKVLPKHSLLYEYFTVYNELTKVKYVTEGMRKPAFLSGEQKKAIVDLLFKTNRKVTVKQLKEDYFKKIECFDSVEISGVEDRFNASLGTYHDLLKIIKDKDFLDNEENEDILEDIVLTLTLFEDREMIEERLKTYAHLFDDKVMKQLKRRRYTGWGRLSRKLINGIRDKQSGKTILDFLKSDGFANRNFMQLIHDDSLTFKEDIQKAQVSGQGDSLHEHIANLAGSPAIKKGILQTVKVVDELVKVMGRHKPENIVIEMARENQTTQKGQKNSRERMKRIEEGIKELGSQILKEHPVENTQLQNEKLYLYYLQNGRDMYVDQELDINRLSDYDVDHIVPQSFLKDDSIDNKVLTRSDKNRGKSDNVPSEEVVKKMKNYWRQLLNAKLITQRKFDNLTKAERGGLSELDKAGFIKRQLVETRQITKHVAQILDSRMNTKYDENDKLIREVKVITLKSKLVSDFRKDFQFYKVREINNYHHAHDAYLNAVVGTALIKKYPKLESEFVYGDYKVYDVRKMIAKSEQEIGKATAKYFFYSNIMNFFKTEITLANTAHAEIMALRQGGLVMQNYRLIDATLYVTFEPCVMCAGAMIHSRIGRVVFGVRNAKTGAAGSLMDVLHYPGMNHRVEITEGILADECAALLCYFFRMPRQVFNAQKKAQSSTDGSSGSETPGTSESATPESSGSEVEFSHEYWMRHALTLAKRARDEREVPVGAVLVLNNRVIGEGWNRAIGLHDPGEIRKRPLIETNGETGEIVWDKGRDFATVRKVLSMPQVNIVKKTEVQTGGFSKESILPKRNSDKLIARKKDWDPKKYGGFDSPTVAYSVLVVAKVEKGKSKKLKSVKELLGITIMERSSFEKNPIDFLEAKGYKEVKKDLIIKLPKYSLFELENGRKRMLASAGELQKGNELALPSKYVNFLYLASHYEKLKGSPEDNEQKQLFVEQHKHYLDEIIEQISEFSKRVILADANLDKVLSAYNKHRDKPIREQAENIIHLFTLTNLGAPAAFKYFDTTIDRKRYTSTKEVLDATLIHQSITGLYETRIDLSQLGGD

SEQ ID NO: 308 - protein, 1554 aa, synthetic construct
  REGION 1..1554: note = 132 TadA CP65ins 1246 polypeptide sequence
MDKKYSIGLAIGTNSVGWAVITDEYKVPSKKFKVLGNTDRHSIKKNLIGALLFDSGETAEATRLKRTARRRYTRRKNRICYLQEIFSNEMAKVDDSFFHRLEESFLVEEDKKHERHPIFGNIVDEVAYHEKYPTIYHLRKKLVDSTDKADLRLIYLALAHMIKFRGHFLIEGDLNPDNSDVDKLFIQLVQTYNQLFEENPINASGVDAKAILSARLSKSRRLENLIAQLPGEKKNGLFGNLIALSLGLTPNFKSNFDLAEDAKLQLSKDTYDDDLDNLLAQIGDQYADLFLAAKNLSDAILLSDILRVNTEITKAPLSASMIKRYDEHHQDLTLLKALVRQQLPEKYKEIFFDQSKNGYAGYIDGGASQEEFYKFIKPILEKMDGTEELLVKLNREDLLRKQRTFDNGSIPHQIHLGELHAILRRQEDFYPFLKDNREKIEKILTFRIPYYVGPLARGNSRFAWMTRKSEETITPWNFEEVVDKGASAQSFIERMTNFDKNLPNEKVLPKHSLLYEYFTVYNELTKVKYVTEGMRKPAFLSGEQKKAIVDLLFKTNRKVTVKQLKEDYFKKIECFDSVEISGVEDRFNASLGTYHDLLKIIKDKDFLDNEENEDILEDIVLTLTLFEDREMIEERLKTYAHLFDDKVMKQLKRRRYTGWGRLSRKLINGIRDKQSGKTILDFLKSDGFANRNFMQLIHDDSLTFKEDIQKAQVSGQGDSLHEHIANLAGSPAIKKGILQTVKVVDELVKVMGRHKPENIVIEMARENQTTQKGQKNSRERMKRIEEGIKELGSQILKEHPVENTQLQNEKLYLYYLQNGRDMYVDQELDINRLSDYDVDHIVPQSFLKDDSIDNKVLTRSDKNRGKSDNVPSEEVVKKMKNYWRQLLNAKLITQRKFDNLTKAERGGLSELDKAGFIKRQLVETRQITKHVAQILDSRMNTKYDENDKLIREVKVITLKSKLVSDFRKDFQFYKVREINNYHHAHDAYLNAVVGTALIKKYPKLESEFVYGDYKVYDVRKMIAKSEQEIGKATAKYFFYSNIMNFFKTEITLANGEIRKRPLIETNGETGEIVWDKGRDFATVRKVLSMPQVNIVKKTEVQTGGFSKESILPKRNSDKLIARKKDWDPKKYGGFDSPTVAYSVLVVAKVEKGKSKKLKSVKELLGITIMERSSFEKNPIDFLEAKGYKEVKKDLIIKLPKYSLFELENGRKRMLASAGELQKGNELALPSKYVNFLYLASHYEKLKGTAHAEIMALRQGGLVMQNYRLIDATLYVTFEPCVMCAGAMIHSRIGRVVFGVRNAKTGAAGSLMDVLHYPGMNHRVEITEGILADECAALLCYFFRMPRQVFNAQKKAQSSTDGSSGSETPGTSESATPESSGSEVEFSHEYWMRHALTLAKRARDEREVPVGAVLVLNNRVIGEGWNRAIGLHDPSPEDNEQKQLFVEQHKHYLDEIIEQISEFSKRVILADANLDKVLSAYNKHRDKPIREQAENIIHLFTLTNLGAPAAFKYFDTTIDRKRYTSTKEVLDATLIHQSITGLYETRIDLSQLGGD

SEQ ID NO: 309 - protein, 160 aa, Staphylococcus aureus
  REGION 1..160: note = MISC_FEATURE - TadA polypeptide sequence
MGSHMTNDIYFMTLAIEEAKKAAQLGEVPIGAIITKDDEVIARAHNLRETLQQPTAHAEHIAIERAAKVLGSWRLEGCTLYVTLEPCVMCAGTIVMSRIPRVVYGADDPKGGCSGSLMNLLQQSNFNHRAIVDKGVLKEACSTLLTTFFKNLRANKKSTN

SEQ ID NO: 310 - protein, 161 aa, Bacillus subtilis
  REGION 1..161: note = MISC_FEATURE - TadA polypeptide sequence
MTQDELYMKEAIKEAKKAEEKGEVPIGAVLVINGEIIARAHNLRETEQRSIAHAEMLVIDEACKALGTWRLEGATLYVTLEPCPMCAGAVVLSRVEKVVFGAFDPKGGCSGTLMNLLQEERFNHQAEVVSGVLEEECGGMLSAFFRELRKKKKAARKNLSE

SEQ ID NO: 311 - protein, 183 aa, Salmonella enterica
  REGION 1..183: note = MISC_FEATURE - TadA polypeptide sequence
  source 1..183: note = subspecies enterica; serovar Typhimurium
MPPAFITGVTSLSDVELDHEYWMRHALTLAKRAWDEREVPVGAVLVHNHRVIGEGWNRPIGRHDPTAHAEIMALRQGGLVLQNYRLLDTTLYVTLEPCVMCAGAMVHSRIGRVVFGARDAKTGAAGSLIDVLHHPGMNHRVEIIEGVLRDECATLLSDFFRMRRQEIKALKKADRAEGAGPAV

SEQ ID NO: 312 - protein, 164 aa, Shewanella putrefaciens
  REGION 1..164: note = MISC_FEATURE - TadA polypeptide sequence
MDEYWMQVAMQMAEKAEAAGEVPVGAVLVKDGQQIATGYNLSISQHDPTAHAEILCLRSAGKKLENYRLLDATLYITLEPCAMCAGAMVHSRIARVVYGARDEKTGAAGTVVNLLQHPAFNHQVEVTSGVLAEACSAQLSRFFKRRRDEKKALKLAQRAQQGIE

SEQ ID NO: 313 - protein, 173 aa, Haemophilus influenzae
  REGION 1..173: note = MISC_FEATURE - TadA polypeptide sequence
MDAAKVRSEFDEKMMRYALELADKAEALGEIPVGAVLVDDARNIIGEGWNLSIVQSDPTAHAEIIALRNGAKNIQNYRLLNSTLYVTLEPCTMCAGAILHSRIKRLVFGASDYKTGAIGSRFHFFDDYKMNHTLEITSGVLAEECSQKLSTFFQKRREEKKIEKALLKSLSDK

SEQ ID NO: 314 - protein, 161 aa, Caulobacter crescentus
  REGION 1..161: note = MISC_FEATURE - TadA polypeptide sequence
MRTDESEDQDHRMMRLALDAARAAAEAGETPVGAVILDPSTGEVIATAGNGPIAAHDPTAHAEIAAMRAAAAKLGNYRLTDLTLVVTLEPCAMCAGAISHARIGRVVFGADDPKGGAVVHGPKFFAQPTCHWRPEVTGGVLADESADLLRGFFRARRKAKI

SEQ ID NO: 315 - protein, 179 aa, Geobacter sulfurreducens
  REGION 1..179: note = MISC_FEATURE - TadA polypeptide sequence
MSSLKKTPIRDDAYWMGKAIREAAKAAARDEVPIGAVIVRDGAVIGRGHNLREGSNDPSAHAEMIAIRQAARRSANWRLTGATLYVTLEPCLMCMGAIILARLERVVFGCYDPKGGAAGSLYDLSADPRLNHQVRLSPGVCQEECGTMLSDFFRDLRRRKKAKATPALFIDERKVPPEP

SEQ ID NO: 316 - protein, 167 aa, synthetic construct
  REGION 1..167: note = TadA*8 polypeptide sequence
MSEVEFSHEYWMRHALTLAKRARDEREVPVGAVLVLNNRVIGEGWNRAIGLHDPTAHAEIMALRQGGLVMQNYRLIDATLYVTFEPCVMCAGAMIHSRIGRVVFGVRNAKTGAAGSLMDVLHYPGMNHRVEITEGILADECAALLCTFFRMPRQVFNAQKKAQSSTD

SEQ ID NO: 317 - RNA, 80 nt, synthetic construct
  misc_feature 1..80: note = gRNA scaffold polynucleotide sequence
  source 1..80: mol_type = other RNA
gttttagagctagaaatagcaagttaaaataaggctagtccgttatcaacttgaaaaagtggcaccgagtcggtgctttt

SEQ ID NO: 318 - RNA, 125 nt, synthetic construct
  misc_feature 1..125: note = gRNA scaffold polynucleotide sequence
  source 1..125: mol_type = other RNA
gtttttgtactctcaagatttaagtaactgtacaacgaaacttacacagttacttaaatcttgcagaagctacaaagataaggcttcatgccgaaatcaacaccctgtcattttatggcagggtg

SEQ ID NO: 319 - RNA, 76 nt, Streptococcus pyogenes
  misc_feature 1..76: note = S. pyogenes gRNA scaffold oligonucleotide sequence
  source 1..76: mol_type = other RNA
gttttagagctagaaatagcaagttaaaataaggctagtccgttatcaacttgaaaaagtggcaccgagtcggtgc

SEQ ID NO: 320 - RNA, 84 nt, Staphylococcus aureus
  misc_feature 1..84: note = S. aureus gRNA scaffold oligonucleotide sequence
  source 1..84: mol_type = other RNA
gttttagtactctgtaatgaaaattacagaatctactaaaacaaggcaaaatgccgtgtttatctcgtcaacttgttggcgaga

SEQ ID NO: 321 - RNA, 97 nt, Bacillus hisashii
  misc_feature 1..97: note = BhCas12b gRNA scaffold oligonucleotide sequence
  source 1..97: mol_type = other RNA
gttctgtcttttggtcaggacaaccgtctagctataagtgctgcagggtgtgagaaactcctattgctggacgatgtctcttacgaggcattagcac

SEQ ID NO: 322 - RNA, 88 nt, Bacillus sp.
  misc_feature 1..88: note = BvCas12b gRNA scaffold oligonucleotide sequence
  source 1..88: mol_type = other RNA
gacctatagggtcaatgaatctgtgcgtgtgccataagtaattaaaaattacccaccacaggagcacctgaaaacaggtgcttggcac

SEQ ID NO: 323 - RNA, 80 nt, synthetic construct
  misc_feature 1..80: note = gRNA scaffold nucleotide sequence; oligonucleotide sequence
  modified_base 78..80: mod_base = um
  misc_feature 78..80: note = In embodiments, a nucleotide(s) is linked to the preceding 5' nucleotide by a 3' phosphorothioate internucleotide linkage
  source 1..80: mol_type = other RNA
gttttagagctagaaatagcaagttaaaataaggctagtccgttatcaacttgaaaaagtgggaccgagtcggtgctttt

SEQ ID NO: 324 - RNA, 80 nt, synthetic construct; identical to SEQ ID NO: 317
  misc_feature 1..80: note = gRNA scaffold nucleotide sequence
  misc_feature 78..80: note = In embodiments, a nucleotide(s) is linked to the preceding 5' nucleotide by a 3' phosphorothioate internucleotide linkage
  modified_base 78..80: mod_base = um
  source 1..80: mol_type = other RNA

SEQ ID NO: 325 - RNA, 117 nt, Bacillus hisashii
  misc_feature 1..117: note = BhCas12b gRNA scaffold + guide sequence; oligonucleotide sequence
  misc_feature 1..97: note = BhCas12b sgRNA scaffold
  source 1..117: mol_type = other RNA
gttctgtcttttggtcaggacaaccgtctagctataagtgctgcagggtgtgagaaactcctattgctggacgatgtctcttacgaggcattagcacnnnnnnnnnnnnnnnnnnnn

SEQ ID NO: 326 - RNA, 108 nt, Bacillus sp.
  misc_feature 1..108: note = BvCas12b gRNA scaffold + guide sequence; oligonucleotide sequence
  misc_feature 1..88: note = BvCas12b gRNA scaffold
  source 1..108: mol_type = other RNA
gacctatagggtcaatgaatctgtgcgtgtgccataagtaattaaaaattacccaccacaggagcacctgaaaacaggtgcttggcacnnnnnnnnnnnnnnnnnnnn

SEQ ID NO: 327 - RNA, 119 nt, Alicyclobacillus acidiphilus
  misc_feature 1..119: note = AaCas12b gRNA scaffold + guide sequence; oligonucleotide sequence
  misc_feature 1..99: note = AaCas12b gRNA scaffold
  source 1..119: mol_type = other RNA
gtctaaaggacagaatttttcaacgggtgtgccaatggccactttccaggtggcaaagcccgttgaacttctcaaaaagaacgatctgagaagtggcacnnnnnnnnnnnnnnnnnnnn

SEQ ID NO: 328 - protein, 29 aa, synthetic construct
  REGION 1..29: note = synthetic polypeptide sequence
PKKKRKVEGADKRTADGSEFESPKKKRKV

SEQ ID NO: 329 - protein, 23 aa, synthetic construct
  REGION 1..23: note = synthetic peptide sequence
RKSGKIAAIVVKRPRKPKKKRKV

SEQ ID NO: 330 - protein, 8 aa, synthetic construct
  REGION 1..8: note = synthetic peptide sequence
SGGSSGGS

SEQ ID NO: 331 - protein, 1609 aa, synthetic construct
  REGION 1..1609: note = pNMG-B335ABE8.1_Y147T_CP5_NGC PAM_monomer polypeptide sequence
MSEVEFSHEYWMRHALTLAKRARDEREVPVGAVLVLNNRVIGEGWNRAIGLHDPTAHAEIMALRQGGLVMQNYRLIDATLYVTFEPCVMCAGAMIHSRIGRVVFGVRNAKTGAAGSLMDVLHYPGMNHRVEITEGILADECAALLCTFFRMPRQVFNAQKKAQSSTDSGGSSGGSSGSETPGTSESATPESSGGSSGGSEIGKATAKYFFYSNIMNFFKTEITLANGEIRKRPLIETNGETGEIVWDKGRDFATVRKVLSMPQVNIVKKTEVQTGGFSKESILPKRNSDKLIARKKDWDPKKYGGFMQPTVAYSVLVVAKVEKGKSKKLKSVKELLGITIMERSSFEKNPIDFLEAKGYKEVKKDLIIKLPKYSLFELENGRKRMLASAKFLQKGNELALPSKYVNFLYLASHYEKLKGSPEDNEQKQLFVEQHKHYLDEIIEQISEFSKRVILADANLDKVLSAYNKHRDKPIREQAENIIHLFTLTNLGAPRAFKYFDTTIARKEYRSTKEVLDATLIHQSITGLYETRIDLSQLGGDGGSGGSGGSGGSGGSGGSGGMDKKYSIGLAIGTNSVGWAVITDEYKVPSKKFKVLGNTDRHSIKKNLIGALLFDSGETAEATRLKRTARRRYTRRKNRICYLQEIFSNEMAKVDDSFFHRLEESFLVEEDKKHERHPIFGNIVDEVAYHEKYPTIYHLRKKLVDSTDKADLRLIYLALAHMIKFRGHFLIEGDLNPDNSDVDKLFIQLVQTYNQLFEENPINASGVDAKAILSARLSKSRRLENLIAQLPGEKKNGLFGNLIALSLGLTPNFKSNFDLAEDAKLQLSKDTYDDDLDNLLAQIGDQYADLFLAAKNLSDAILLSDILRVNTEITKAPLSASMIKRYDEHHQDLTLLKALVRQQLPEKYKEIFFDQSKNGYAGYIDGGASQEEFYKFIKPILEKMDGTEELLVKLNREDLLRKQRTFDNGSIPHQIHLGELHAILRRQEDFYPFLKDNREKIEKILTFRIPYYVGPLARGNSRFAWMTRKSEETITPWNFEEVVDKGASAQSFIERMTNFDKNLPNEKVLPKHSLLYEYFTVYNELTKVKYVTEGMRKPAFLSGEQKKAIVDLLFKTNRKVTVKQLKEDYFKKIECFDSVEISGVEDRFNASLGTYHDLLKIIKDKDFLDNEENEDILEDIVLTLTLFEDREMIEERLKTYAHLFDDKVMKQLKRRRYTGWGRLSRKLINGIRDKQSGKTILDFLKSDGFANRNFMQLIHDDSLTFKEDIQKAQVSGQGDSLHEHIANLAGSPAIKKGILQTVKVVDELVKVMGRHKPENIVIEMARENQTTQKGQKNSRERMKRIEEGIKELGSQILKEHPVENTQLQNEKLYLYYLQNGRDMYVDQELDINRLSDYDVDHIVPQSFLKDDSIDNKVLTRSDKNRGKSDNVPSEEVVKKMKNYWRQLLNAKLITQRKFDNLTKAERGGLSELDKAGFIKRQLVETRQITKHVAQILDSRMNTKYDENDKLIREVKVITLKSKLVSDFRKDFQFYKVREINNYHHAHDAYLNAVVGTALIKKYPKLESEFVYGDYKVYDVRKMIAKSEQEGADKRTADGSEFESPKKKRKV

SEQ ID NO: 332 - protein, 1807 aa, synthetic construct
  REGION 1..1807: note = pNMG-357_ABE8.14 with NGC PAMCP5 polypeptide sequence
  REGION 1..174: note = MISC_FEATURE - Adenosine deaminase sequence
  REGION 175..198: note = MISC_FEATURE - Linker sequence
  REGION 199..365: note = MISC_FEATURE - Adenosine deaminase sequence
  REGION 366..397: note = MISC_FEATURE - Linker sequence
  REGION 398..738: note = MISC_FEATURE - Sequence derived from Cas9
  REGION 739..759: note = MISC_FEATURE - Linker sequence
  REGION 760..1785: note = MISC_FEATURE - Sequence derived from Cas9
  REGION 1786..1807: note = MISC_FEATURE - Bipartite nuclear localization sequence
MSEVEFSHEYWMRHALTLAKRAWDEREVPVGAVLVHNNRVIGEGWNRPIGRHDPTAHAEIMALRQGGLVMQNYRLIDATLYVTLEPCVMCAGAMIHSRIGRVVFGARDAKTGAAGSLMDVLHHPGMNHRVEITEGILADECAALLSDFFRMRRQEIKAQKKAQSSTDGGSSGGSSGSETPGTSESATPESSGGSSGGSMSEVEFSHEYWMRHALTLAKRARDEREVPVGAVLVLNNRVIGEGWNRAIGLHDPTAHAEIMALRQGGLVMQNYRLIDATLYVTFEPCVMCAGAMIHSRIGRVVFGVRNAKTGAAGSLMDVLHYPGMNHRVEITEGILADECAALLCTFFRMPRQVFNAQKKAQSSTDSGGSSGGSSGSETPGTSESATPESSGGSSGGSEIGKATAKYFFYSNIMNFFKTEITLANGEIRKRPLIETNGETGEIVWDKGRDFATVRKVLSMPQVNIVKKTEVQTGGFSKESILPKRNSDKLIARKKDWDPKKYGGFMQPTVAYSVLVVAKVEKGKSKKLKSVKELLGITIMERSSFEKNPIDFLEAKGYKEVKKDLIIKLPKYSLFELENGRKRMLASAKFLQKGNELALPSKYVNFLYLASHYEKLKGSPEDNEQKQLFVEQHKHYLDEIIEQISEFSKRVILADANLDKVLSAYNKHRDKPIREQAENIIHLFTLTNLGAPRAFKYFDTTIARKEYRSTKEVLDATLIHQSITGLYETRIDLSQLGGDGGSGGSGGSGGSGGSGGSGGMDKKYSIGLAIGTNSVGWAVITDEYKVPSKKFKVLGNTDRHSIKKNLIGALLFDSGETAEATRLKRTARRRYTRRKNRICYLQEIFSNEMAKVDDSFFHRLEESFLVEEDKKHERHPIFGNIVDEVAYHEKYPTIYHLRKKLVDSTDKADLRLIYLALAHMIKFRGHFLIEGDLNPDNSDVDKLFIQLVQTYNQLFEENPINASGVDAKAILSARLSKSRRLENLIAQLPGEKKNGLFGNLIALSLGLTPNFKSNFDLAEDAKLQLSKDTYDDDLDNLLAQIGDQYADLFLAAKNLSDAILLSDILRVNTEITKAPLSASMIKRYDEHHQDLTLLKALVRQQLPEKYKEIFFDQSKNGYAGYIDGGASQEEFYKFIKPILEKMDGTEELLVKLNREDLLRKQRTFDNGSIPHQIHLGELHAILRRQEDFYPFLKDNREKIEKILTFRIPYYVGPLARGNSRFAWMTRKSEETITPWNFEEVVDKGASAQSFIERMTNFDKNLPNEKVLPKHSLLYEYFTVYNELTKVKYVTEGMRKPAFLSGEQKKAIVDLLFKTNRKVTVKQLKEDYFKKIECFDSVEISGVEDRFNASLGTYHDLLKIIKDKDFLDNEENEDILEDIVLTLTLFEDREMIEERLKTYAHLFDDKVMKQLKRRRYTGWGRLSRKLINGIRDKQSGKTILDFLKSDGFANRNFMQLIHDDSLTFKEDIQKAQVSGQGDSLHEHIANLAGSPAIKKGILQTVKVVDELVKVMGRHKPENIVIEMARENQTTQKGQKNSRERMKRIEEGIKELGSQILKEHPVENTQLQNEKLYLYYLQNGRDMYVDQELDINRLSDYDVDHIVPQSFLKDDSIDNKVLTRSDKNRGKSDNVPSEEVVKKMKNYWRQLLNAKLITQRKFDNLTKAERGGLSELDKAGFIKRQLVETRQITKHVAQILDSRMNTKYDENDKLIREVKVITLKSKLVSDFRKDFQFYKVREINNYHHAHDAYLNAVVGTALIKKYPKLESEFVYGDYKVYDVRKMIAKSEQEGADKRTADGSEFESPKKKRKV

SEQ ID NO: 333 - protein, 1588 aa, synthetic construct
  REGION 1..1588: note = ABE8.8-m polypeptide sequence
  REGION 1..167: note = MISC_FEATURE - Adenosine deaminase sequence
  REGION 168..199: note = MISC_FEATURE - Linker sequence
  REGION 200..1566: note = MISC_FEATURE - Sequence derived from Cas9
  REGION 1567..1588: note = MISC_FEATURE - Bipartite nuclear localization sequence
MSEVEFSHEYWMRHALTLAKRARDEREVPVGAVLVLNNRVIGEGWNRAIGLHDPTAHAEIMALRQGGLVMQNYRLIDATLYVTFEPCVMCAGAMIHSRIGRVVFGVRNAKTGAAGSLMDVLHHPGMNHRVEITEGILADECAALLCRFFRMPRRVFNAQKKAQSSTDSGGSSGGSSGSETPGTSESATPESSGGSSGGSDKKYSIGLAIGTNSVGWAVITDEYKVPSKKFKVLGNTDRHSIKKNLIGALLFDSGETAEATRLKRTARRRYTRRKNRICYLQEIFSNEMAKVDDSFFHRLEESFLVEEDKKHERHPIFGNIVDEVAYHEKYPTIYHLRKKLVDSTDKADLRLIYLALAHMIKFRGHFLIEGDLNPDNSDVDKLFIQLVQTYNQLFEENPINASGVDAKAILSARLSKSRRLENLIAQLPGEKKNGLFGNLIALSLGLTPNFKSNFDLAEDAKLQLSKDTYDDDLDNLLAQIGDQYADLFLAAKNLSDAILLSDILRVNTEITKAPLSASMIKRYDEHHQDLTLLKALVRQQLPEKYKEIFFDQSKNGYAGYIDGGASQEEFYKFIKPILEKMDGTEELLVKLNREDLLRKQRTFDNGSIPHQIHLGELHAILRRQEDFYPFLKDNREKIEKILTFRIPYYVGPLARGNSRFAWMTRKSEETITPWNFEEVVDKGASAQSFIERMTNFDKNLPNEKVLPKHSLLYEYFTVYNELTKVKYVTEGMRKPAFLSGEQKKAIVDLLFKTNRKVTVKQLKEDYFKKIECFDSVEISGVEDRFNASLGTYHDLLKIIKDKDFLDNEENEDILEDIVLTLTLFEDREMIEERLKTYAHLFDDKVMKQLKRRRYTGWGRLSRKLINGIRDKQSGKTILDFLKSDGFANRNFMQLIHDDSLTFKEDIQKAQVSGQGDSLHEHIANLAGSPAIKKGILQTVKVVDELVKVMGRHKPENIVIEMARENQTTQKGQKNSRERMKRIEEGIKELGSQILKEHPVENTQLQNEKLYLYYLQNGRDMYVDQELDINRLSDYDVDHIVPQSFLKDDSIDNKVLTRSDKNRGKSDNVPSEEVVKKMKNYWRQLLNAKLITQRKFDNLTKAERGGLSELDKAGFIKRQLVETRQITKHVAQILDSRMNTKYDENDKLIREVKVITLKSKLVSDFRKDFQFYKVREINNYHHAHDAYLNAVVGTALIKKYPKLESEFVYGDYKVYDVRKMIAKSEQEIGKATAKYFFYSNIMNFFKTEITLANGEIRKRPLIETNGETGEIVWDKGRDFATVRKVLSMPQVNIVKKTEVQTGGFSKESILPKRNSDKLIARKKDWDPKKYGGFDSPTVAYSVLVVAKVEKGKSKKLKSVKELLGITIMERSSFEKNPIDFLEAKGYKEVKKDLIIKLPKYSLFELENGRKRMLASAGELQKGNELALPSKYVNFLYLASHYEKLKGSPEDNEQKQLFVEQHKHYLDEIIEQISEFSKRVILADANLDKVLSAYNKHRDKPIREQAENIIHLFTLTNLGAPAAFKYFDTTIDRKRYTSTKEVLDATLIHQSITGLYETRIDLSQLGGDEGADKRTADGSEFESPKKKRKV

SEQ ID NO: 334 - protein, 1786 aa, synthetic construct
  REGION 1..1786: note = ABE8.8-d polypeptide sequence
  REGION 1..167: note = MISC_FEATURE - Adenosine deaminase sequence
  REGION 168..199: note = MISC_FEATURE - Linker sequence
  REGION 200..365: note = MISC_FEATURE - Adenosine deaminase sequence
  REGION 366..397: note = MISC_FEATURE - Linker sequence
  REGION 398..1764: note = MISC_FEATURE - Sequence derived from Cas9
  REGION 1765..1786: note = MISC_FEATURE - Bipartite nuclear localization sequence
MSEVEFSHEYWMRHALTLAKRAWDEREVPVGAVLVHNNRVIGEGWNRPIGRHDPTAHAEIMALRQGGLVMQNYRLIDATLYVTLEPCVMCAGAMIHSRIGRVVFGARDAKTGAAGSLMDVLHHPGMNHRVEITEGILADECAALLSDFFRMRRQEIKAQKKAQSSTDSGGSSGGSSGSETPGTSESATPESSGGSSGGSSEVEFSHEYWMRHALTLAKRARDEREVPVGAVLVLNNRVIGEGWNRAIGLHDPTAHAEIMALRQGGLVMQNYRLIDATLYVTFEPCVMCAGAMIHSRIGRVVFGVRNAKTGAAGSLMDVLHHPGMNHRVEITEGILADECAALLCRFFRMPRRVFNAQKKAQSSTDSGGSSGGSSGSETPGTSESATPESSGGSSGGSDKKYSIGLAIGTNSVGWAVITDEYKVPSKKFKVLGNTDRHSIKKNLIGALLFDSGETAEATRLKRTARRRYTRRKNRICYLQEIFSNEMAKVDDSFFHRLEESFLVEEDKKHERHPIFGNIVDEVAYHEKYPTIYHLRKKLVDSTDKADLRLIYLALAHMIKFRGHFLIEGDLNPDNSDVDKLFIQLVQTYNQLFEENPINASGVDAKAILSARLSKSRRLENLIAQLPGEKKNGLFGNLIALSLGLTPNFKSNFDLAEDAKLQLSKDTYDDDLDNLLAQIGDQYADLFLAAKNLSDAILLSDILRVNTEITKAPLSASMIKRYDEHHQDLTLLKALVRQQLPEKYKEIFFDQSKNGYAGYIDGGASQEEFYKFIKPILEKMDGTEELLVKLNREDLLRKQRTFDNGSIPHQIHLGELHAILRRQEDFYPFLKDNREKIEKILTFRIPYYVGPLARGNSRFAWMTRKSEETITPWNFEEVVDKGASAQSFIERMTNFDKNLPNEKVLPKHSLLYEYFTVYNELTKVKYVTEGMRKPAFLSGEQKKAIVDLLFKTNRKVTVKQLKEDYFKKIECFDSVEISGVEDRFNASLGTYHDLLKIIKDKDFLDNEENEDILEDIVLTLTLFEDREMIEERLKTYAHLFDDKVMKQLKRRRYTGWGRLSRKLINGIRDKQSGKTILDFLKSDGFANRNFMQLIHDDSLTFKEDIQKAQVSGQGDSLHEHIANLAGSPAIKKGILQTVKVVDELVKVMGRHKPENIVIEMARENQTTQKGQKNSRERMKRIEEGIKELGSQILKEHPVENTQLQNEKLYLYYLQNGRDMYVDQELDINRLSDYDVDHIVPQSFLKDDSIDNKVLTRSDKNRGKSDNVPSEEVVKKMKNYWRQLLNAKLITQRKFDNLTKAERGGLSELDKAGFIKRQLVETRQITKHVAQILDSRMNTKYDENDKLIREVKVITLKSKLVSDFRKDFQFYKVREINNYHHAHDAYLNAVVGTALIKKYPKLESEFVYGDYKVYDVRKMIAKSEQEIGKATAKYFFYSNIMNFFKTEITLANGEIRKRPLIETNGETGEIVWDKGRDFATVRKVLSMPQVNIVKKTEVQTGGFSKESILPKRNSDKLIARKKDWDPKKYGGFDSPTVAYSVLVVAKVEKGKSKKLKSVKELLGITIMERSSFEKNPIDFLEAKGYKEVKKDLIIKLPKYSLFELENGRKRMLASAGELQKGNELALPSKYVNFLYLASHYEKLKGSPEDNEQKQLFVEQHKHYLDEIIEQISEFSKRVILADANLDKVLSAYNKHRDKPIREQAENIIHLFTLTNLGAPAAFKYFDTTIDRKRYTSTKEVLDATLIHQSITGLYETRIDLSQLGGDEGADKRTADGSEFESPKKKRKV

SEQ ID NO: 335 - protein, 1588 aa, synthetic construct
  REGION 1..1588: note = ABE8.13-m polypeptide sequence
  REGION 1..167: note = MISC_FEATURE - Adenosine deaminase sequence
  REGION 168..199: note = MISC_FEATURE - Linker sequence
  REGION 200..1566: note = MISC_FEATURE - Sequence derived from Cas9
  REGION 1567..1588: note = MISC_FEATURE - Bipartite nuclear localization sequence
MSEVEFSHEYWMRHALTLAKRARDEREVPVGAVLVLNNRVIGEGWNRAIGLHDPTAHAEIMALRQGGLVMQNYRLYDATLYVTFEPCVMCAGAMIHSRIGRVVFGVRNAKTGAAGSLMDVLHHPGMNHRVEITEGILADECAALLCRFFRMPRRVFNAQKKAQSSTDSGGSSGGSSGSETPGTSESATPESSGGSSGGSDKKYSIGLAIGTNSVGWAVITDEYKVPSKKFKVLGNTDRHSIKKNLIGALLFDSGETAEATRLKRTARRRYTRRKNRICYLQEIFSNEMAKVDDSFFHRLEESFLVEEDKKHERHPIFGNIVDEVAYHEKYPTIYHLRKKLVDSTDKADLRLIYLALAHMIKFRGHFLIEGDLNPDNSDVDKLFIQLVQTYNQLFEENPINASGVDAKAILSARLSKSRRLENLIAQLPGEKKNGLFGNLIALSLGLTPNFKSNFDLAEDAKLQLSKDTYDDDLDNLLAQIGDQYADLFLAAKNLSDAILLSDILRVNTEITKAPLSASMIKRYDEHHQDLTLLKALVRQQLPEKYKEIFFDQSKNGYAGYIDGGASQEEFYKFIKPILEKMDGTEELLVKLNREDLLRKQRTFDNGSIPHQIHLGELHAILRRQEDFYPFLKDNREKIEKILTFRIPYYVGPLARGNSRFAWMTRKSEETITPWNFEEVVDKGASAQSFIERMTNFDKNLPNEKVLPKHSLLYEYFTVYNELTKVKYVTEGMRKPAFLSGEQKKAIVDLLFKTNRKVTVKQLKEDYFKKIECFDSVEISGVEDRFNASLGTYHDLLKIIKDKDFLDNEENEDILEDIVLTLTLFEDREMIEERLKTYAHLFDDKVMKQLKRRRYTGWGRLSRKLINGIRDKQSGKTILDFLKSDGFANRNFMQLIHDDSLTFKEDIQKAQVSGQGDSLHEHIANLAGSPAIKKGILQTVKVVDELVKVMGRHKPENIVIEMARENQTTQKGQKNSRERMKRIEEGIKELGSQILKEHPVENTQLQNEKLYLYYLQNGRDMYVDQELDINRLSDYDVDHIVPQSFLKDDSIDNKVLTRSDKNRGKSDNVPSEEVVKKMKNYWRQLLNAKLITQRKFDNLTKAERGGLSELDKAGFIKRQLVETRQITKHVAQILDSRMNTKYDENDKLIREVKVITLKSKLVSDFRKDFQFYKVREINNYHHAHDAYLNAVVGTALIKKYPKLESEFVYGDYKVYDVRKMIAKSEQEIGKATAKYFFYSNIMNFFKTEITLANGEIRKRPLIETNGETGEIVWDKGRDFATVRKVLSMPQVNIVKKTEVQTGGFSKESILPKRNSDKLIARKKDWDPKKYGGFDSPTVAYSVLVVAKVEKGKSKKLKSVKELLGITIMERSSFEKNPIDFLEAKGYKEVKKDLIIKLPKYSLFELENGRKRMLASAGELQKGNELALPSKYVNFLYLASHYEKLKGSPEDNEQKQLFVEQHKHYLDEIIEQISEFSKRVILADANLDKVLSAYNKHRDKPIREQAENIIHLFTLTNLGAPAAFKYFDTTIDRKRYTSTKEVLDATLIHQSITGLYETRIDLSQLGGDEGADKRTADGSEFESPKKKRKV

SEQ ID NO: 336 - protein, 1786 aa, synthetic construct
  REGION 1..1786: note = ABE8.13-d polypeptide sequence
  REGION 1..167: note = MISC_FEATURE - Adenosine deaminase sequence
  REGION 168..199: note = MISC_FEATURE - Linker sequence
  REGION 200..365: note = MISC_FEATURE - Adenosine deaminase sequence
  REGION 366..397: note = MISC_FEATURE - Linker sequence
  REGION 398..1764: note = MISC_FEATURE - Sequence derived from Cas9
  REGION 1765..1786: note = MISC_FEATURE - Bipartite nuclear localization sequence
MSEVEFSHEYWMRHALTLAKRAWDEREVPVGAVLVHNNRVIGEGWNRPIGRHDPTAHAEIMALRQGGLVMQNYRLIDATLYVTLEPCVMCAGAMIHSRIGRVVFGARDAKTGAAGSLMDVLHHPGMNHRVEITEGILADECAALLSDFFRMRRQEIKAQKKAQSSTDSGGSSGGSSGSETPGTSESATPESSGGSSGGSSEVEFSHEYWMRHALTLAKRARDEREVPVGAVLVLNNRVIGEGWNRAIGLHDPTAHAEIMALRQGGLVMQNYRLYDATLYVTFEPCVMCAGAMIHSRIGRVVFGVRNAKTGAAGSLMDVLHHPGMNHRVEITEGILADECAALLCRFFRMPRRVFNAQKKAQSSTDSGGSSGGSSGSETPGTSESATPESSGGSSGGSDKKYSIGLAIGTNSVGWAVITDEYKVPSKKFKVLGNTDRHSIKKNLIGALLFDSGETAEATRLKRTARRRYTRRKNRICYLQEIFSNEMAKVDDSFFHRLEESFLVEEDKKHERHPIFGNIVDEVAYHEKYPTIYHLRKKLVDSTDKADLRLIYLALAHMIKFRGHFLIEGDLNPDNSDVDKLFIQLVQTYNQLFEENPINASGVDAKAILSARLSKSRRLENLIAQLPGEKKNGLFGNLIALSLGLTPNFKSNFDLAEDAKLQLSKDTYDDDLDNLLAQIGDQYADLFLAAKNLSDAILLSDILRVNTEITKAPLSASMIKRYDEHHQDLTLLKALVRQQLPEKYKEIFFDQSKNGYAGYIDGGASQEEFYKFIKPILEKMDGTEELLVKLNREDLLRKQRTFDNGSIPHQIHLGELHAILRRQEDFYPFLKDNREKIEKILTFRIPYYVGPLARGNSRFAWMTRKSEETITPWNFEEVVDKGASAQSFIERMTNFDKNLPNEKVLPKHSLLYEYFTVYNELTKVKYVTEGMRKPAFLSGEQKKAIVDLLFKTNRKVTVKQLKEDYFKKIECFDSVEISGVEDRFNASLGTYHDLLKIIKDKDFLDNEENEDILEDIVLTLTLFEDREMIEERLKTYAHLFDDKVMKQLKRRRYTGWGRLSRKLINGIRDKQSGKTILDFLKSDGFANRNFMQLIHDDSLTFKEDIQKAQVSGQGDSLHEHIANLAGSPAIKKGILQTVKVVDELVKVMGRHKPENIVIEMARENQTTQKGQKNSRERMKRIEEGIKELGSQILKEHPVENTQLQNEKLYLYYLQNGRDMYVDQELDINRLSDYDVDHIVPQSFLKDDSIDNKVLTRSDKNRGKSDNVPSEEVVKKMKNYWRQLLNAKLITQRKFDNLTKAERGGLSELDKAGFIKRQLVETRQITKHVAQILDSRMNTKYDENDKLIREVKVITLKSKLVSDFRKDFQFYKVREINNYHHAHDAYLNAVVGTALIKKYPKLESEFVYGDYKVYDVRKMIAKSEQEIGKATAKYFFYSNIMNFFKTEITLANGEIRKRPLIETNGETGEIVWDKGRDFATVRKVLSMPQVNIVKKTEVQTGGFSKESILPKRNSDKLIARKKDWDPKKYGGFDSPTVAYSVLVVAKVEKGKSKKLKSVKELLGITIMERSSFEKNPIDFLEAKGYKEVKKDLIIKLPKYSLFELENGRKRMLASAGELQKGNELALPSKYVNFLYLASHYEKLKGSPEDNEQKQLFVEQHKHYLDEIIEQISEFSKRVILADANLDKVLSAYNKHRDKPIREQAENIIHLFTLTNLGAPAAFKYFDTTIDRKRYTSTKEVLDATLIHQSITGLYETRIDLSQLGGDEGADKRTADGSEFESPKKKRKV

SEQ ID NO: 337 - protein, 1588 aa, synthetic construct
  REGION 1..1588: note = ABE8.17-m polypeptide sequence
  REGION 1..167: note = MISC_FEATURE - Adenosine deaminase sequence
  REGION 168..199: note = MISC_FEATURE - Linker sequence
  REGION 200..1566: note = MISC_FEATURE - Sequence derived from Cas9
  REGION 1567..1588: note = MISC_FEATURE - Bipartite nuclear localization sequence
MSEVEFSHEYWMRHALTLAKRARDEREVPVGAVLVLNNRVIGEGWNRAIGLHDPTAHAEIMALRQGGLVMQNYRLIDATLYSTFEPCVMCAGAMIHSRIGRVVFGVRNAKTGAAGSLMDVLHYPGMNHRVEITEGILADECAALLCYFFRMPRRVFNAQKKAQSSTDSGGSSGGSSGSETPGTSESATPESSGGSSGGSDKKYSIGLAIGTNSVGWAVITDEYKVPSKKFKVLGNTDRHSIKKNLIGALLFDSGETAEATRLKRTARRRYTRRKNRICYLQEIFSNEMAKVDDSFFHRLEESFLVEEDKKHERHPIFGNIVDEVAYHEKYPTIYHLRKKLVDSTDKADLRLIYLALAHMIKFRGHFLIEGDLNPDNSDVDKLFIQLVQTYNQLFEENPINASGVDAKAILSARLSKSRRLENLIAQLPGEKKNGLFGNLIALSLGLTPNFKSNFDLAEDAKLQLSKDTYDDDLDNLLAQIGDQYADLFLAAKNLSDAILLSDILRVNTEITKAPLSASMIKRYDEHHQDLTLLKALVRQQLPEKYKEIFFDQSKNGYAGYIDGGASQEEFYKFIKPILEKMDGTEELLVKLNREDLLRKQRTFDNGSIPHQIHLGELHAILRRQEDFYPFLKDNREKIEKILTFRIPYYVGPLARGNSRFAWMTRKSEETITPWNFEEVVDKGASAQSFIERMTNFDKNLPNEKVLPKHSLLYEYFTVYNELTKVKYVTEGMRKPAFLSGEQKKAIVDLLFKTNRKVTVKQLKEDYFKKIECFDSVEISGVEDRFNASLGTYHDLLKIIKDKDFLDNEENEDILEDIVLTLTLFEDREMIEERLKTYAHLFDDKVMKQLKRRRYTGWGRLSRKLINGIRDKQSGKTILDFLKSDGFANRNFMQLIHDDSLTFKEDIQKAQVSGQGDSLHEHIANLAGSPAIKKGILQTVKVVDELVKVMGRHKPENIVIEMARENQTTQKGQKNSRERMKRIEEGIKELGSQILKEHPVENTQLQNEKLYLYYLQNGRDMYVDQELDINRLSDYDVDHIVPQSFLKDDSIDNKVLTRSDKNRGKSDNVPSEEVVKKMKNYWRQLLNAKLITQRKFDNLTKAERGGLSELDKAGFIKRQLVETRQITKHVAQILDSRMNTKYDENDKLIREVKVITLKSKLVSDFRKDFQFYKVREINNYHHAHDAYLNAVVGTALIKKYPKLESEFVYGDYKVYDVRKMIAKSEQEIGKATAKYFFYSNIMNFFKTEITLANGEIRKRPLIETNGETGEIVWDKGRDFATVRKVLSMPQVNIVKKTEVQTGGFSKESILPKRNSDKLIARKKDWDPKKYGGFDSPTVAYSVLVVAKVEKGKSKKLKSVKELLGITIMERSSFEKNPIDFLEAKGYKEVKKDLIIKLPKYSLFELENGRKRMLASAGELQKGNELALPSKYVNFLYLASHYEKLKGSPEDNEQKQLFVEQHKHYLDEIIEQISEFSKRVILADANLDKVLSAYNKHRDKPIREQAENIIHLFTLTNLGAPAAFKYFDTTIDRKRYTSTKEVLDATLIHQSITGLYETRIDLSQLGGDEGADKRTADGSEFESPKKKRKV

SEQ ID NO: 338 - protein, 1786 aa, synthetic construct
  REGION 1..1786: note = ABE8.17-d polypeptide sequence
  REGION 1..167: note = MISC_FEATURE - Adenosine deaminase sequence
  REGION 168..199: note = MISC_FEATURE - Linker sequence
  REGION 200..365: note = MISC_FEATURE - Adenosine deaminase sequence
  REGION 366..397: note = MISC_FEATURE - Linker sequence
  REGION 398..1764: note = MISC_FEATURE - Sequence derived from Cas9
  REGION 1765..1786: note = MISC_FEATURE - Bipartite nuclear localization sequence
MSEVEFSHEYWMRHALTLAKRAWDEREVPVGAVLVHNNRVIGEGWNRPIGRHDPTAHAEIMALRQGGLVMQNYRLIDATLYVTLEPCVMCAGAMIHSRIGRVVFGARDAKTGAAGSLMDVLHHPGMNHRVEITEGILADECAALLSDFFRMRRQEIKAQKKAQSSTDSGGSSGGSSGSETPGTSESATPESSGGSSGGSSEVEFSHEYWMRHALTLAKRARDEREVPVGAVLVLNNRVIGEGWNRAIGLHDPTAHAEIMALRQGGLVMQNYRLIDATLYSTFEPCVMCAGAMIHSRIGRVVFGVRNAKTGAAGSLMDVLHYPGMNHRVEITEGILADECAALLCYFFRMPRRVFNAQKKAQSSTDSGGSSGGSSGSETPGTSESATPESSGGSSGGSDKKYSIGLAIGTNSVGWAVITDEYKVPSKKFKVLGNTDRHSIKKNLIGALLFDSGETAEATRLKRTARRRYTRRKNRICYLQEIFSNEMAKVDDSFFHRLEESFLVEEDKKHERHPIFGNIVDEVAYHEKYPTIYHLRKKLVDSTDKADLRLIYLALAHMIKFRGHFLIEGDLNPDNSDVDKLFIQLVQTYNQLFEENPINASGVDAKAILSARLSKSRRLENLIAQLPGEKKNGLFGNLIALSLGLTPNFKSNFDLAEDAKLQLSKDTYDDDLDNLLAQIGDQYADLFLAAKNLSDAILLSDILRVNTEITKAPLSASMIKRYDEHHQDLTLLKALVRQQLPEKYKEIFFDQSKNGYAGYIDGGASQEEFYKFIKPILEKMDGTEELLVKLNREDLLRKQRTFDNGSIPHQIHLGELHAILRRQEDFYPFLKDNREKIEKILTFRIPYYVGPLARGNSRFAWMTRKSEETITPWNFEEVVDKGASAQSFIERMTNFDKNLPNEKVLPKHSLLYEYFTVYNELTKVKYVTEGMRKPAFLSGEQKKAIVDLLFKTNRKVTVKQLKEDYFKKIECFDSVEISGVEDRFNASLGTYHDLLKIIKDKDFLDNEENEDILEDIVLTLTLFEDREMIEERLKTYAHLFDDKVMKQLKRRRYTGWGRLSRKLINGIRDKQSGKTILDFLKSDGFANRNFMQLIHDDSLTFKEDIQKAQVSGQGDSLHEHIANLAGSPAIKKGILQTVKVVDELVKVMGRHKPENIVIEMARENQTTQKGQKNSRERMKRIEEGIKELGSQILKEHPVENTQLQNEKLYLYYLQNGRDMYVDQELDINRLSDYDVDHIVPQSFLKDDSIDNKVLTRSDKNRGKSDNVPSEEVVKKMKNYWRQLLNAKLITQRKFDNLTKAERGGLSELDKAGFIKRQLVETRQITKHVAQILDSRMNTKYDENDKLIREVKVITLKSKLVSDFRKDFQFYKVREINNYHHAHDAYLNAVVGTALIKKYPKLESEFVYGDYKVYDVRKMIAKSEQEIGKATAKYFFYSNIMNFFKTEITLANGEIRKRPLIETNGETGEIVWDKGRDFATVRKVLSMPQVNIVKKTEVQTGGFSKESILPKRNSDKLIARKKDWDPKKYGGFDSPTVAYSVLVVAKVEKGKSKKLKSVKELLGITIMERSSFEKNPIDFLEAKGYKEVKKDLIIKLPKYSLFELENGRKRMLASAGELQKGNELALPSKYVNFLYLASHYEKLKGSPEDNEQKQLFVEQHKHYLDEIIEQISEFSKRVILADANLDKVLSAYNKHRDKPIREQAENIIHLFTLTNLGAPAAFKYFDTTIDRKRYTSTKEVLDATLIHQSITGLYETRIDLSQLGGDEGADKRTADGSEFESPKKKRKV

SEQ ID NO: 339 - protein, 1588 aa, synthetic construct
  REGION 1..1588: note = ABE8.20-m polypeptide sequence
  REGION 1..167: note = MISC_FEATURE - Adenosine deaminase sequence
  REGION 168..199: note = MISC_FEATURE - Linker sequence
  REGION 200..1566: note = MISC_FEATURE - Sequence derived from Cas9
  REGION 1567..1588: note = MISC_FEATURE - Bipartite nuclear localization sequence
MSEVEFSHEYWMRHALTLAKRARDEREVPVGAVLVLNNRVIGEGWNRAIGLHDPTAHAEIMALRQGGLVMQNYRLYDATLYSTFEPCVMCAGAMIHSRIGRVVFGVRNAKTGAAGSLMDVLHHPGMNHRVEITEGILADECAALLCRFFRMPRRVFNAQKKAQSSTDSGGSSGGSSGSETPGTSESATPESSGGSSGGSDKKYSIGLAIGTNSVGWAVITDEYKVPSKKFKVLGNTDRHSIKKNLIGALLFDSGETAEATRLKRTARRRYTRRKNRICYLQEIFSNEMAKVDDSFFHRLEESFLVEEDKKHERHPIFGNIVDEVAYHEKYPTIYHLRKKLVDSTDKADLRLIYLALAHMIKFRGHFLIEGDLNPDNSDVDKLFIQLVQTYNQLFEENPINASGVDAKAILSARLSKSRRLENLIAQLPGEKKNGLFGNLIALSLGLTPNFKSNFDLAEDAKLQLSKDTYDDDLDNLLAQIGDQYADLFLAAKNLSDAILLSDILRVNTEITKAPLSASMIKRYDEHHQDLTLLKALVRQQLPEKYKEIFFDQSKNGYAGYIDGGASQEEFYKFIKPILEKMDGTEELLVKLNREDLLRKQRTFDNGSIPHQIHLGELHAILRRQEDFYPFLKDNREKIEKILTFRIPYYVGPLARGNSRFAWMTRKSEETITPWNFEEVVDKGASAQSFIERMTNFDKNLPNEKVLPKHSLLYEYFTVYNELTKVKYVTEGMRKPAFLSGEQKKAIVDLLFKTNRKVTVKQLKEDYFKKIECFDSVEISGVEDRFNASLGTYHDLLKIIKDKDFLDNEENEDILEDIVLTLTLFEDREMIEERLKTYAHLFDDKVMKQLKRRRYTGWGRLSRKLINGIRDKQSGKTILDFLKSDGFANRNFMQLIHDDSLTFKEDIQKAQVSGQGDSLHEHIANLAGSPAIKKGILQTVKVVDELVKVMGRHKPENIVIEMARENQTTQKGQKNSRERMKRIEEGIKELGSQILKEHPVENTQLQNEKLYLYYLQNGRDMYVDQELDINRLSDYDVDHIVPQSFLKDDSIDNKVLTRSDKNRGKSDNVPSEEVVKKMKNYWRQLLNAKLITQRKFDNLTKAERGGLSELDKAGFIKRQLVETRQITKHVAQILDSRMNTKYDENDKLIREVKVITLKSKLVSDFRKDFQFYKVREINNYHHAHDAYLNAVVGTALIKKYPKLESEFVYGDYKVYDVRKMIAKSEQEIGKATAKYFFYSNIMNFFKTEITLANGEIRKRPLIETNGETGEIVWDKGRDFATVRKVLSMPQVNIVKKTEVQTGGFSKESILPKRNSDKLIARKKDWDPKKYGGFDSPTVAYSVLVVAKVEKGKSKKLKSVKELLGITIMERSSFEKNPIDFLEAKGYKEVKKDLIIKLPKYSLFELENGRKRMLASAGELQKGNELALPSKYVNFLYLASHYEKLKGSPEDNEQKQLFVEQHKHYLDEIIEQISEFSKRVILADANLDKVLSAYNKHRDKPIREQAENIIHLFTLTNLGAPAAFKYFDTTIDRKRYTSTKEVLDATLIHQSITGLYETRIDLSQLGGDEGADKRTADGSEFESPKKKRKV

SEQ ID NO: 340 - protein, 1786 aa, synthetic construct
  REGION 1..1786: note = ABE8.20-d polypeptide sequence
  REGION 1..167: note = MISC_FEATURE - Adenosine deaminase sequence
  REGION 168..199: note = MISC_FEATURE - Linker sequence
  REGION 200..365: note = MISC_FEATURE - Adenosine deaminase sequence
  REGION 366..397: note = MISC_FEATURE - Linker sequence
  REGION 398..1764: note = MISC_FEATURE - Sequence derived from Cas9
  REGION 1765..1786: note = MISC_FEATURE - Bipartite nuclear localization sequence
MSEVEFSHEYWMRHALTLAKRAWDEREVPVGAVLVHNNRVIGEGWNRPIGRHDPTAHAEIMALRQGGLVMQNYRLIDATLYVTLEPCVMCAGAMIHSRIGRVVFGARDAKTGAAGSLMDVLHHPGMNHRVEITEGILADECAALLSDFFRMRRQEIKAQKKAQSSTDSGGSSGGSSGSETPGTSESATPESSGGSSGGSSEVEFSHEYWMRHALTLAKRARDEREVPVGAVLVLNNRVIGEGWNRAIGLHDPTAHAEIMALRQGGLVMQNYRLYDATLYSTFEPCVMCAGAMIHSRIGRVVFGVRNAKTGAAGSLMDVLHHPGMNHRVEITEGILADECAALLCRFFRMPRRVFNAQKKAQSSTDSGGSSGGSSGSETPGTSESATPESSGGSSGGSDKKYSIGLAIGTNSVGWAVITDEYKVPSKKFKVLGNTDRHSIKKNLIGALLFDSGETAEATRLKRTARRRYTRRKNRICYLQEIFSNEMAKVDDSFFHRLEESFLVEEDKKHERHPIFGNIVDEVAYHEKYPTIYHLRKKLVDSTDKADLRLIYLALAHMIKFRGHFLIEGDLNPDNSDVDKLFIQLVQTYNQLFEENPINASGVDAKAILSARLSKSRRLENLIAQLPGEKKNGLFGNLIALSLGLTPNFKSNFDLAEDAKLQLSKDTYDDDLDNLLAQIGDQYADLFLAAKNLSDAILLSDILRVNTEITKAPLSASMIKRYDEHHQDLTLLKALVRQQLPEKYKEIFFDQSKNGYAGYIDGGASQEEFYKFIKPILEKMDGTEELLVKLNREDLLRKQRTFDNGSIPHQIHLGELHAILRRQEDFYPFLKDNREKIEKILTFRIPYYVGPLARGNSRFAWMTRKSEETITPWNFEEVVDKGASAQSFIERMTNFDKNLPNEKVLPKHSLLYEYFTVYNELTKVKYVTEGMRKPAFLSGEQKKAIVDLLFKTNRKVTVKQLKEDYFKKIECFDSVEISGVEDRFNASLGTYHDLLKIIKDKDFLDNEENEDILEDIVLTLTLFEDREMIEERLKTYAHLFDDKVMKQLKRRRYTGWGRLSRKLINGIRDKQSGKTILDFLKSDGFANRNFMQLIHDDSLTFKEDIQKAQVSGQGDSLHEHIANLAGSPAIKKGILQTVKVVDELVKVMGRHKPENIVIEMARENQTTQKGQKNSRERMKRIEEGIKELGSQILKEHPVENTQLQNEKLYLYYLQNGRDMYVDQELDINRLSDYDVDHIVPQSFLKDDSIDNKVLTRSDKNRGKSDNVPSEEVVKKMKNYWRQLLNAKLITQRKFDNLTKAERGGLSELDKAGFIKRQLVETRQITKHVAQILDSRMNTKYDENDKLIREVKVITLKSKLVSDFRKDFQFYKVREINNYHHAHDAYLNAVVGTALIKKYPKLESEFVYGDYKVYDVRKMIAKSEQEIGKATAKYFFYSNIMNFFKTEITLANGEIRKRPLIETNGETGEIVWDKGRDFATVRKVLSMPQVNIVKKTEVQTGGFSKESILPKRNSDKLIARKKDWDPKKYGGFDSPTVAYSVLVVAKVEKGKSKKLKSVKELLGITIMERSSFEKNPIDFLEAKGYKEVKKDLIIKLPKYSLFELENGRKRMLASAGELQKGNELALPSKYVNFLYLASHYEKLKGSPEDNEQKQLFVEQHKHYLDEIIEQISEFSKRVILADANLDKVLSAYNKHRDKPIREQAENIIHLFTLTNLGAPAAFKYFDTTIDRKRYTSTKEVLDATLIHQSITGLYETRIDLSQLGGDEGADKRTADGSEFESPKKKRKV

SEQ ID NO: 341 - protein, 1588 aa, synthetic construct
  REGION 1..1588: note = 01. monoABE8.1_bpNLS + Y147T polypeptide sequence
MSEVEFSHEYWMRHALTLAKRARDEREVPVGAVLVLNNRVIGEGWNRAIGLHDPTAHAEIMALRQGGLVMQNYRLIDATLYVTFEPCVMCAGAMIHSRIGRVVFGVRNAKTGAAGSLMDVLHYPGMNHRVEITEGILADECAALLCTFFRMPRQVFNAQKKAQSSTDSGGSSGGSSGSETPGTSESATPESSGGSSGGSDKKYSIGLAIGTNSVGWAVITDEYKVPSKKFKVLGNTDRHSIKKNLIGALLFDSGETAEATRLKRTARRRYTRRKNRICYLQEIFSNEMAKVDDSFFHRLEESFLVEEDKKHERHPIFGNIVDEVAYHEKYPTIYHLRKKLVDSTDKADLRLIYLALAHMIKFRGHFLIEGDLNPDNSDVDKLFIQLVQTYNQLFEENPINASGVDAKAILSARLSKSRRLENLIAQLPGEKKNGLFGNLIALSLGLTPNFKSNFDLAEDAKLQLSKDTYDDDLDNLLAQIGDQYADLFLAAKNLSDAILLSDILRVNTEITKAPLSASMIKRYDEHHQDLTLLKALVRQQLPEKYKEIFFDQSKNGYAGYIDGGASQEEFYKFIKPILEKMDGTEELLVKLNREDLLRKQRTFDNGSIPHQIHLGELHAILRRQEDFYPFLKDNREKIEKILTFRIPYYVGPLARGNSRFAWMTRKSEETITPWNFEEVVDKGASAQSFIERMTNFDKNLPNEKVLPKHSLLYEYFTVYNELTKVKYVTEGMRKPAFLSGEQKKAIVDLLFKTNRKVTVKQLKEDYFKKIECFDSVEISGVEDRFNASLGTYHDLLKIIKDKDFLDNEENEDILEDIVLTLTLFEDREMIEERLKTYAHLFDDKVMKQLKRRRYTGWGRLSRKLINGIRDKQSGKTILDFLKSDGFANRNFMQLIHDDSLTFKEDIQKAQVSGQGDSLHEHIANLAGSPAIKKGILQTVKVVDELVKVMGRHKPENIVIEMARENQTTQKGQKNSRERMKRIEEGIKELGSQILKEHPVENTQLQNEKLYLYYLQNGRDMYVDQELDINRLSDYDVDHIVPQSFLKDDSIDNKVLTRSDKNRGKSDNVPSEEVVKKMKNYWRQLLNAKLITQRKFDNLTKAERGGLSELDKAGFIKRQLVETRQITKHVAQILDSRMNTKYDENDKLIREVKVITLKSKLVSDFRKDFQFYKVREINNYHHAHDAYLNAVVGTALIKKYPKLESEFVYGDYKVYDVRKMIAKSEQEIGKATAKYFFYSNIMNFFKTEITLANGEIRKRPLIETNGETGEIVWDKGRDFATVRKVLSMPQVNIVKKTEVQTGGFSKESILPKRNSDKLIARKKDWDPKKYGGFVSPTVAYSVLVVAKVEKGKSKKLKSVKELLGITIMERSSFEKNPIDFLEAKGYKEVKKDLIIKLPKYSLFELENGRKRMLASARELQKGNELALPSKYVNFLYLASHYEKLKGSPEDNEQKQLFVEQHKHYLDEIIEQISEFSKRVILADANLDKVLSAYNKHRDKPIREQAENIIHLFTLTNLGAPAAFKYFDTTIDRKQYRSTKEVLDATLIHQSITGLYETRIDLSQLGGDEGADKRTADGSEFESPKKKRKV

SEQ ID NO: 342 - protein, 1588 aa, synthetic construct
  REGION 1..1588: note = 02. monoABE8.1_bpNLS + Y147R polypeptide sequence
MSEVEFSHEYWMRHALTLAKRARDEREVPVGAVLVLNNRVIGEGWNRAIGLHDPTAHAEIMALRQGGLVMQNYRLIDATLYVTFEPCVMCAGAMIHSRIGRVVFGVRNAKTGAAGSLMDVLHYPGMNHRVEITEGILADECAALLCRFFRMPRQVFNAQKKAQSSTDSGGSSGGSSGSETPGTSESATPESSGGSSGGSDKKYSIGLAIGTNSVGWAVITDEYKVPSKKFKVLGNTDRHSIKKNLIGALLFDSGETAEATRLKRTARRRYTRRKNRICYLQEIFSNEMAKVDDSFFHRLEESFLVEEDKKHERHPIFGNIVDEVAYHEKYPTIYHLRKKLVDSTDKADLRLIYLALAHMIKFRGHFLIEGDLNPDNSDVDKLFIQLVQTYNQLFEENPINASGVDAKAILSARLSKSRRLENLIAQLPGEKKNGLFGNLIALSLGLTPNFKSNFDLAEDAKLQLSKDTYDDDLDNLLAQIGDQYADLFLAAKNLSDAILLSDILRVNTEITKAPLSASMIKRYDEHHQDLTLLKALVRQQLPEKYKEIFFDQSKNGYAGYIDGGASQEEFYKFIKPILEKMDGTEELLVKLNREDLLRKQRTFDNGSIPHQIHLGELHAILRRQEDFYPFLKDNREKIEKILTFRIPYYVGPLARGNSRFAWMTRKSEETITPWNFEEVVDKGASAQSFIERMTNFDKNLPNEKVLPKHSLLYEYFTVYNELTKVKYVTEGMRKPAFLSGEQKKAIVDLLFKTNRKVTVKQLKEDYFKKIECFDSVEISGVEDRFNASLGTYHDLLKIIKDKDFLDNEENEDILEDIVLTLTLFEDREMIEERLKTYAHLFDDKVMKQLKRRRYTGWGRLSRKLINGIRDKQSGKTILDFLKSDGFANRNFMQLIHDDSLTFKEDIQKAQVSGQGDSLHEHIANLAGSPAIKKGILQTVKVVDELVKVMGRHKPENIVIEMARENQTTQKGQKNSRERMKRIEEGIKELGSQILKEHPVENTQLQNEKLYLYYLQNGRDMYVDQELDINRLSDYDVDHIVPQSFLKDDSIDNKVLTRSDKNRGKSDNVPSEEVVKKMKNYWRQLLNAKLITQRKFDNLTKAERGGLSELDKAGFIKRQLVETRQITKHVAQILDSRMNTKYDENDKLIREVKVITLKSKLVSDFRKDFQFYKVREINNYHHAHDAYLNAVVGTALIKKYPKLESEFVYGDYKVYDVRKMIAKSEQEIGKATAKYFFYSNIMNFFKTEITLANGEIRKRPLIETNGETGEIVWDKGRDFATVRKVLSMPQVNIVKKTEVQTGGFSKESILPKRNSDKLIARKKDWDPKKYGGFVSPTVAYSVLVVAKVEKGKSKKLKSVKELLGITIMERSSFEKNPIDFLEAKGYKEVKKDLIIKLPKYSLFELENGRKRMLASARELQKGNELALPSKYVNFLYLASHYEKLKGSPEDNEQKQLFVEQHKHYLDEIIEQISEFSKRVILADANLDKVLSAYNKHRDKPIREQAENIIHLFTLTNLGAPAAFKYFDTTIDRKQYRSTKEVLDATLIHQSITGLYETRIDLSQLGGDEGADKRTADGSEFESPKKKRKV

SEQ ID NO: 343 - protein, 1588 aa, synthetic construct
  REGION 1..1588: note = 03. monoABE8.1_bpNLS + Q154S polypeptide sequence
MSEVEFSHEYWMRHALTLAKRARDEREVPVGAVLVLNNRVIGEGWNRAIGLHDPTAHAEIMALRQGGLVMQNYRLIDATLYVTFEPCVMCAGAMIHSRIGRVVFGVRNAKTGAAGSLMDVLHYPGMNHRVEITEGILADECAALLCYFFRMPRSVFNAQKKAQSSTDSGGSSGGSSGSETPGTSESATPESSGGSSGGSDKKYSIGLAIGTNSVGWAVITDEYKVPSKKFKVLGNTDRHSIKKNLIGALLFDSGETAEATRLKRTARRRYTRRKNRICYLQEIFSNEMAKVDDSFFHRLEESFLVEEDKKHERHPIFGNIVDEVAYHEKYPTIYHLRKKLVDSTDKADLRLIYLALAHMIKFRGHFLIEGDLNPDNSDVDKLFIQLVQTYNQLFEENPINASGVDAKAILSARLSKSRRLENLIAQLPGEKKNGLFGNLIALSLGLTPNFKSNFDLAEDAKLQLSKDTYDDDLDNLLAQIGDQYADLFLAAKNLSDAILLSDILRVNTEITKAPLSASMIKRYDEHHQDLTLLKALVRQQLPEKYKEIFFDQSKNGYAGYIDGGASQEEFYKFIKPILEKMDGTEELLVKLNREDLLRKQRTFDNGSIPHQIHLGELHAILRRQEDFYPFLKDNREKIEKILTFRIPYYVGPLARGNSRFAWMTRKSEETITPWNFEEVVDKGASAQSFIERMTNFDKNLPNEKVLPKHSLLYEYFTVYNELTKVKYVTEGMRKPAFLSGEQKKAIVDLLFKTNRKVTVKQLKEDYFKKIECFDSVEISGVEDRFNASLGTYHDLLKIIKDKDFLDNEENEDILEDIVLTLTLFEDREMIEERLKTYAHLFDDKVMKQLKRRRYTGWGRLSRKLINGIRDKQSGKTILDFLKSDGFANRNFMQLIHDDSLTFKEDIQKAQVSGQGDSLHEHIANLAGSPAIKKGILQTVKVVDELVKVMGRHKPENIVIEMARENQTTQKGQKNSRERMKRIEEGIKELGSQILKEHPVENTQLQNEKLYLYYLQNGRDMYVDQELDINRLSDYDVDHIVPQSFLKDDSIDNKVLTRSDKNRGKSDNVPSEEVVKKMKNYWRQLLNAKLITQRKFDNLTKAERGGLSELDKAGFIKRQLVETRQITKHVAQILDSRMNTKYDENDKLIREVKVITLKSKLVSDFRKDFQFYKVREINNYHHAHDAYLNAVVGTALIKKYPKLESEFVYGDYKVYDVRKMIAKSEQEIGKATAKYFFYSNIMNFFKTEITLANGEIRKRPLIETNGETGEIVWDKGRDFATVRKVLSMPQVNIVKKTEVQTGGFSKESILPKRNSDKLIARKKDWDPKKYGGFVSPTVAYSVLVVAKVEKGKSKKLKSVKELLGITIMERSSFEKNPIDFLEAKGYKEVKKDLIIKLPKYSLFELENGRKRMLASARELQKGNELALPSKYVNFLYLASHYEKLKGSPEDNEQKQLFVEQHKHYLDEIIEQISEFSKRVILADANLDKVLSAYNKHRDKPIREQAENIIHLFTLTNLGAPAAFKYFDTTIDRKQYRSTKEVLDATLIHQSITGLYETRIDLSQLGGDEGADKRTADGSEFESPKKKRKV

SEQ ID NO: 344 - protein, 1588 aa, synthetic construct
  REGION 1..1588: note = 04. monoABE8.1_bpNLS + Y123H polypeptide sequence
MSEVEFSHEYWMRHALTLAKRARDEREVPVGAVLVLNNRVIGEGWNRAIGLHDPTAHAEIMALRQGGLVMQNYRLIDATLYVTFEPCVMCAGAMIHSRIGRVVFGVRNAKTGAAGSLMDVLHHPGMNHRVEITEGILADECAALLCYFFRMPRQVFNAQKKAQSSTDSGGSSGGSSGSETPGTSESATPESSGGSSGGSDKKYSIGLAIGTNSVGWAVITDEYKVPSKKFKVLGNTDRHSIKKNLIGALLFDSGETAEATRLKRTARRRYTRRKNRICYLQEIFSNEMAKVDDSFFHRLEESFLVEEDKKHERHPIFGNIVDEVAYHEKYPTIYHLRKKLVDSTDKADLRLIYLALAHMIKFRGHFLIEGDLNPDNSDVDKLFIQLVQTYNQLFEENPINASGVDAKAILSARLSKSRRLENLIAQLPGEKKNGLFGNLIALSLGLTPNFKSNFDLAEDAKLQLSKDTYDDDLDNLLAQIGDQYADLFLAAKNLSDAILLSDILRVNTEITKAPLSASMIKRYDEHHQDLTLLKALVRQQLPEKYKEIFFDQSKNGYAGYIDGGASQEEFYKFIKPILEKMDGTEELLVKLNREDLLRKQRTFDNGSIPHQIHLGELHAILRRQEDFYPFLKDNREKIEKILTFRIPYYVGPLARGNSRFAWMTRKSEETITPWNFEEVVDKGASAQSFIERMTNFDKNLPNEKVLPKHSLLYEYFTVYNELTKVKYVTEGMRKPAFLSGEQKKAIVDLLFKTNRKVTVKQLKEDYFKKIECFDSVEISGVEDRFNASLGTYHDLLKIIKDKDFLDNEENEDILEDIVLTLTLFEDREMIEERLKTYAHLFDDKVMKQLKRRRYTGWGRLSRKLINGIRDKQSGKTILDFLKSDGFANRNFMQLIHDDSLTFKEDIQKAQVSGQGDSLHEHIANLAGSPAIKKGILQTVKVVDELVKVMGRHKPENIVIEMARENQTTQKGQKNSRERMKRIEEGIKELGSQILKEHPVENTQLQNEKLYLYYLQNGRDMYVDQELDINRLSDYDVDHIVPQSFLKDDSIDNKVLTRSDKNRGKSDNVPSEEVVKKMKNYWRQLLNAKLITQRKFDNLTKAERGGLSELDKAGFIKRQLVETRQITKHVAQILDSRMNTKYDENDKLIREVKVITLKSKLVSDFRKDFQFYKVREINNYHHAHDAYLNAVVGTALIKKYPKLESEFVYGDYKVYDVRKMIAKSEQEIGKATAKYFFYSNIMNFFKTEITLANGEIRKRPLIETNGETGEIVWDKGRDFATVRKVLSMPQVNIVKKTEVQTGGFSKESILPKRNSDKLIARKKDWDPKKYGGFVSPTVAYSVLVVAKVEKGKSKKLKSVKELLGITIMERSSFEKNPIDFLEAKGYKEVKKDLIIKLPKYSLFELENGRKRMLASARELQKGNELALPSKYVNFLYLASHYEKLKGSPEDNEQKQLFVEQHKHYLDEIIEQISEFSKRVILADANLDKVLSAYNKHRDKPIREQAENIIHLFTLTNLGAPAAFKYFDTTIDRKQYRSTKEVLDATLIHQSITGLYETRIDLSQLGGDEGADKRTADGSEFESPKKKRKV

SEQ ID NO: 345 - protein, 1588 aa, synthetic construct
  REGION 1..1588: note = 05. monoABE8.1_bpNLS + V82S polypeptide sequence
MSEVEFSHEYWMRHALTLAKRARDEREVPVGAVLVLNNRVIGEGWNRAIGLHDPTAHAEIMALRQGGLVMQNYRLIDATLYSTFEPCVMCAGAMIHSRIGRVVFGVRNAKTGAAGSLMDVLHYPGMNHRVEITEGILADECAALLCYFFRMPRQVFNAQKKAQSSTDSGGSSGGSSGSETPGTSESATPESSGGSSGGSDKKYSIGLAIGTNSVGWAVITDEYKVPSKKFKVLGNTDRHSIKKNLIGALLFDSGETAEATRLKRTARRRYTRRKNRICYLQEIFSNEMAKVDDSFFHRLEESFLVEEDKKHERHPIFGNIVDEVAYHEKYPTIYHLRKKLVDSTDKADLRLIYLALAHMIKFRGHFLIEGDLNPDNSDVDKLFIQLVQTYNQLFEENPINASGVDAKAILSARLSKSRRLENLIAQLPGEKKNGLFGNLIALSLGLTPNFKSNFDLAEDAKLQLSKDTYDDDLDNLLAQIGDQYADLFLAAKNLSDAILLSDILRVNTEITKAPLSASMIKRYDEHHQDLTLLKALVRQQLPEKYKEIFFDQSKNGYAGYIDGGASQEEFYKFIKPILEKMDGTEELLVKLNREDLLRKQRTFDNGSIPHQIHLGELHAILRRQEDFYPFLKDNREKIEKILTFRIPYYVGPLARGNSRFAWMTRKSEETITPWNFEEVVDKGASAQSFIERMTNFDKNLPNEKVLPKHSLLYEYFTVYNELTKVKYVTEGMRKPAFLSGEQKKAIVDLLFKTNRKVTVKQLKEDYFKKIECFDSVEISGVEDRFNASLGTYHDLLKIIKDKDFLDNEENEDILEDIVLTLTLFEDREMIEERLKTYAHLFDDKVMKQLKRRRYTGWGRLSRKLINGIRDKQSGKTILDFLKSDGFANRNFMQLIHDDSLTFKEDIQKAQVSGQGDSLHEHIANLAGSPAIKKGILQTVKVVDELVKVMGRHKPENIVIEMARENQTTQKGQKNSRERMKRIEEGIKELGSQILKEHPVENTQLQNEKLYLYYLQNGRDMYVDQELDINRLSDYDVDHIVPQSFLKDDSIDNKVLTRSDKNRGKSDNVPSEEVVKKMKNYWRQLLNAKLITQRKFDNLTKAERGGLSELDKAGFIKRQLVETRQITKHVAQILDSRMNTKYDENDKLIREVKVITLKSKLVSDFRKDFQFYKVREINNYHHAHDAYLNAVVGTALIKKYPKLESEFVYGDYKVYDVRKMIAKSEQEIGKATAKYFFYSNIMNFFKTEITLANGEIRKRPLIETNGETGEIVWDKGRDFATVRKVLSMPQVNIVKKTEVQTGGFSKESILPKRNSDKLIARKKDWDPKKYGGFVSPTVAYSVLVVAKVEKGKSKKLKSVKELLGITIMERSSFEKNPIDFLEAKGYKEVKKDLIIKLPKYSLFELENGRKRMLASARELQKGNELALPSKYVNFLYLASHYEKLKGSPEDNEQKQLFVEQHKHYLDEIIEQISEFSKRVILADANLDKVLSAYNKHRDKPIREQAENIIHLFTLTNLGAPAAFKYFDTTIDRKQYRSTKEVLDATLIHQSITGLYETRIDLSQLGGDEGADKRTADGSEFESPKKKRKV

SEQ ID NO: 346 - protein, 1588 aa, synthetic construct
  REGION 1..1588: note = 06. monoABE8.1_bpNLS + T166R polypeptide sequence
MSEVEFSHEYWMRHALTLAKRARDEREVPVGAVLVLNNRVIGEGWNRAIGLHDPTAHAEIMALRQGGLVMQNYRLIDATLYVTFEPCVMCAGAMIHSRIGRVVFGVRNAKTGAAGSLMDVLHYPGMNHRVEITEGILADECAALLCYFFRMPRQVFNAQKKAQSSRDSGGSSGGSSGSETPGTSESATPESSGGSSGGSDKKYSIGLAIGTNSVGWAVITDEYKVPSKKFKVLGNTDRHSIKKNLIGALLFDSGETAEATRLKRTARRRYTRRKNRICYLQEIFSNEMAKVDDSFFHRLEESFLVEEDKKHERHPIFGNIVDEVAYHEKYPTIYHLRKKLVDSTDKADLRLIYLALAHMIKFRGHFLIEGDLNPDNSDVDKLFIQLVQTYNQLFEENPINASGVDAKAILSARLSKSRRLENLIAQLPGEKKNGLFGNLIALSLGLTPNFKSNFDLAEDAKLQLSKDTYDDDLDNLLAQIGDQYADLFLAAKNLSDAILLSDILRVNTEITKAPLSASMIKRYDEHHQDLTLLKALVRQQLPEKYKEIFFDQSKNGYAGYIDGGASQEEFYKFIKPILEKMDGTEELLVKLNREDLLRKQRTFDNGSIPHQIHLGELHAILRRQEDFYPFLKDNREKIEKILTFRIPYYVGPLARGNSRFAWMTRKSEETITPWNFEEVVDKGASAQSFIERMTNFDKNLPNEKVLPKHSLLYEYFTVYNELTKVKYVTEGMRKPAFLSGEQKKAIVDLLFKTNRKVTVKQLKEDYFKKIECFDSVEISGVEDRFNASLGTYHDLLKIIKDKDFLDNEENEDILEDIVLTLTLFEDREMIEERLKTYAHLFDDKVMKQLKRRRYTGWGRLSRKLINGIRDKQSGKTILDFLKSDGFANRNFMQLIHDDSLTFKEDIQKAQVSGQGDSLHEHIANLAGSPAIKKGILQTVKVVDELVKVMGRHKPENIVIEMARENQTTQKGQKNSRERMKRIEEGIKELGSQILKEHPVENTQLQNEKLYLYYLQNGRDMYVDQELDINRLSDYDVDHIVPQSFLKDDSIDNKVLTRSDKNRGKSDNVPSEEVVKKMKNYWRQLLNAKLITQRKFDNLTKAERGGLSELDKAGFIKRQLVETRQITKHVAQILDSRMNTKYDENDKLIREVKVITLKSKLVSDFRKDFQFYKVREINNYHHAHDAYLNAVVGTALIKKYPKLESEFVYGDYKVYDVRKMIAKSEQEIGKATAKYFFYSNIMNFFKTEITLANGEIRKRPLIETNGETGEIVWDKGRDFATVRKVLSMPQVNIVKKTEVQTGGFSKESILPKRNSDKLIARKKDWDPKKYGGFVSPTVAYSVLVVAKVEKGKSKKLKSVKELLGITIMERSSFEKNPIDFLEAKGYKEVKKDLIIKLPKYSLFELENGRKRMLASARELQKGNELALPSKYVNFLYLASHYEKLKGSPEDNEQKQLFVEQHKHYLDEIIEQISEFSKRVILADANLDKVLSAYNKHRDKPIREQAENIIHLFTLTNLGAPAAFKYFDTTIDRKQYRSTKEVLDATLIHQSITGLYETRIDLSQLGGDEGADKRTADGSEFESPKKKRKV

SEQ ID NO: 347 - protein, 1588 aa, synthetic construct
  REGION 1..1588: note = 07. monoABE8.1_bpNLS + Q154R polypeptide sequence
MSEVEFSHEYWMRHALTLAKRARDEREVPVGAVLVLNNRVIGEGWNRAIGLHDPTAHAEIMALRQGGLVMQNYRLIDATLYVTFEPCVMCAGAMIHSRIGRVVFGVRNAKTGAAGSLMDVLHYPGMNHRVEITEGILADECAALLCYFFRMPRRVFNAQKKAQSSTDSGGSSGGSSGSETPGTSESATPESSGGSSGGSDKKYSIGLAIGTNSVGWAVITDEYKVPSKKFKVLGNTDRHSIKKNLIGALLFDSGETAEATRLKRTARRRYTRRKNRICYLQEIFSNEMAKVDDSFFHRLEESFLVEEDKKHERHPIFGNIVDEVAYHEKYPTIYHLRKKLVDSTDKADLRLIYLALAHMIKFRGHFLIEGDLNPDNSDVDKLFIQLVQTYNQLFEENPINASGVDAKAILSARLSKSRRLENLIAQLPGEKKNGLFGNLIALSLGLTPNFKSNFDLAEDAKLQLSKDTYDDDLDNLLAQIGDQYADLFLAAKNLSDAILLSDILRVNTEITKAPLSASMIKRYDEHHQDLTLLKALVRQQLPEKYKEIFFDQSKNGYAGYIDGGASQEEFYKFIKPILEKMDGTEELLVKLNREDLLRKQRTFDNGSIPHQIHLGELHAILRRQEDFYPFLKDNREKIEKILTFRIPYYVGPLARGNSRFAWMTRKSEETITPWNFEEVVDKGASAQSFIERMTNFDKNLPNEKVLPKHSLLYEYFTVYNELTKVKYVTEGMRKPAFLSGEQKKAIVDLLFKTNRKVTVKQLKEDYFKKIECFDSVEISGVEDRFNASLGTYHDLLKIIKDKDFLDNEENEDILEDIVLTLTLFEDREMIEERLKTYAHLFDDKVMKQLKRRRYTGWGRLSRKLINGIRDKQSGKTILDFLKSDGFANRNFMQLIHDDSLTFKEDIQKAQVSGQGDSLHEHIANLAGSPAIKKGILQTVKVVDELVKVMGRHKPENIVIEMARENQTTQKGQKNSRERMKRIEEGIKELGSQILKEHPVENTQLQNEKLYLYYLQNGRDMYVDQELDINRLSDYDVDHIVPQSFLKDDSIDNKVLTRSDKNRGKSDNVPSEEVVKKMKNYWRQLLNAKLITQRKFDNLTKAERGGLSELDKAGFIKRQLVETRQITKHVAQILDSRMNTKYDENDKLIREVKVITLKSKLVSDFRKDFQFYKVREINNYHHAHDAYLNAVVGTALIKKYPKLESEFVYGDYKVYDVRKMIAKSEQEIGKATAKYFFYSNIMNFFKTEITLANGEIRKRPLIETNGETGEIVWDKGRDFATVRKVLSMPQVNIVKKTEVQTGGFSKESILPKRNSDKLIARKKDWDPKKYGGFVSPTVAYSVLVVAKVEKGKSKKLKSVKELLGITIMERSSFEKNPIDFLEAKGYKEVKKDLIIKLPKYSLFELENGRKRMLASARELQKGNELALPSKYVNFLYLASHYEKLKGSPEDNEQKQLFVEQHKHYLDEIIEQISEFSKRVILADANLDKVLSAYNKHRDKPIREQAENIIHLFTLTNLGAPAAFKYFDTTIDRKQYRSTKEVLDATLIHQSITGLYETRIDLSQLGGDEGADKRTADGSEFESPKKKRKV

SEQ ID NO: 348 - protein, 1588 aa, synthetic construct
  REGION 1..1588: note = 08. monoABE8.1_bpNLS +Y147R_Q154R_Y123H polypeptide sequence
MSEVEFSHEYWMRHALTLAKRARDEREVPVGAVLVLNNRVIGEGWNRAIGLHDPTAHAEIMALRQGGLVMQNYRLIDATLYVTFEPCVMCAGAMIHSRIGRVVFGVRNAKTGAAGSLMDVLHHPGMNHRVEITEGILADECAALLCRFFRMPRRVFNAQKKAQSSTDSGGSSGGSSGSETPGTSESATPESSGGSSGGSDKKYSIGLAIGTNSVGWAVITDEYKVPSKKFKVLGNTDRHSIKKNLIGALLFDSGETAEATRLKRTARRRYTRRKNRICYLQEIFSNEMAKVDDSFFHRLEESFLVEEDKKHERHPIFGNIVDEVAYHEKYPTIYHLRKKLVDSTDKADLRLIYLALAHMIKFRGHFLIEGDLNPDNSDVDKLFIQLVQTYNQLFEENPINASGVDAKAILSARLSKSRRLENLIAQLPGEKKNGLFGNLIALSLGLTPNFKSNFDLAEDAKLQLSKDTYDDDLDNLLAQIGDQYADLFLAAKNLSDAILLSDILRVNTEITKAPLSASMIKRYDEHHQDLTLLKALVRQQLPEKYKEIFFDQSKNGYAGYIDGGASQEEFYKFIKPILEKMDGTEELLVKLNREDLLRKQRTFDNGSIPHQIHLGELHAILRRQEDFYPFLKDNREKIEKILTFRIPYYVGPLARGNSRFAWMTRKSEETITPWNFEEVVDKGASAQSFIERMTNFDKNLPNEKVLPKHSLLYEYFTVYNELTKVKYVTEGMRKPAFLSGEQKKAIVDLLFKTNRKVTVKQLKEDYFKKIECFDSVEISGVEDRFNASLGTYHDLLKIIKDKDFLDNEENEDILEDIVLTLTLFEDREMIEERLKTYAHLFDDKVMKQLKRRRYTGWGRLSRKLINGIRDKQSGKTILDFLKSDGFANRNFMQLIHDDSLTFKEDIQKAQVSGQGDSLHEHIANLAGSPAIKKGILQTVKVVDELVKVMGRHKPENIVIEMARENQTTQKGQKNSRERMKRIEEGIKELGSQILKEHPVENTQLQNEKLYLYYLQNGRDMYVDQELDINRLSDYDVDHIVPQSFLKDDSIDNKVLTRSDKNRGKSDNVPSEEVVKKMKNYWRQLLNAKLITQRKFDNLTKAERGGLSELDKAGFIKRQLVETRQITKHVAQILDSRMNTKYDENDKLIREVKVITLKSKLVSDFRKDFQFYKVREINNYHHAHDAYLNAVVGTALIKKYPKLESEFVYGDYKVYDVRKMIAKSEQEIGKATAKYFFYSNIMNFFKTEITLANGEIRKRPLIETNGETGEIVWDKGRDFATVRKVLSMPQVNIVKKTEVQTGGFSKESILPKRNSDKLIARKKDWDPKKYGGFVSPTVAYSVLVVAKVEKGKSKKLKSVKELLGITIMERSSFEKNPIDFLEAKGYKEVKKDLIIKLPKYSLFELENGRKRMLASARELQKGNELALPSKYVNFLYLASHYEKLKGSPEDNEQKQLFVEQHKHYLDEIIEQISEFSKRVILADANLDKVLSAYNKHRDKPIREQAENIIHLFTLTNLGAPAAFKYFDTTIDRKQYRSTKEVLDATLIHQSITGLYETRIDLSQLGGDEGADKRTADGSEFESPKKKRKV

SEQ ID NO: 349 - protein, 1588 aa, synthetic construct
  REGION 1..1588: note = 09. monoABE8.1_bpNLS +Y147R_Q154R_I76Y polypeptide sequence
MSEVEFSHEYWMRHALTLAKRARDEREVPVGAVLVLNNRVIGEGWNRAIGLHDPTAHAEIMALRQGGLVMQNYRLYDATLYVTFEPCVMCAGAMIHSRIGRVVFGVRNAKTGAAGSLMDVLHYPGMNHRVEITEGILADECAALLCRFFRMPRRVFNAQKKAQSSTDSGGSSGGSSGSETPGTSESATPESSGGSSGGSDKKYSIGLAIGTNSVGWAVITDEYKVPSKKFKVLGNTDRHSIKKNLIGALLFDSGETAEATRLKRTARRRYTRRKNRICYLQEIFSNEMAKVDDSFFHRLEESFLVEEDKKHERHPIFGNIVDEVAYHEKYPTIYHLRKKLVDSTDKADLRLIYLALAHMIKFRGHFLIEGDLNPDNSDVDKLFIQLVQTYNQLFEENPINASGVDAKAILSARLSKSRRLENLIAQLPGEKKNGLFGNLIALSLGLTPNFKSNFDLAEDAKLQLSKDTYDDDLDNLLAQIGDQYADLFLAAKNLSDAILLSDILRVNTEITKAPLSASMIKRYDEHHQDLTLLKALVRQQLPEKYKEIFFDQSKNGYAGYIDGGASQEEFYKFIKPILEKMDGTEELLVKLNREDLLRKQRTFDNGSIPHQIHLGELHAILRRQEDFYPFLKDNREKIEKILTFRIPYYVGPLARGNSRFAWMTRKSEETITPWNFEEVVDKGASAQSFIERMTNFDKNLPNEKVLPKHSLLYEYFTVYNELTKVKYVTEGMRKPAFLSGEQKKAIVDLLFKTNRKVTVKQLKEDYFKKIECFDSVEISGVEDRFNASLGTYHDLLKIIKDKDFLDNEENEDILEDIVLTLTLFEDREMIEERLKTYAHLFDDKVMKQLKRRRYTGWGRLSRKLINGIRDKQSGKTILDFLKSDGFANRNFMQLIHDDSLTFKEDIQKAQVSGQGDSLHEHIANLAGSPAIKKGILQTVKVVDELVKVMGRHKPENIVIEMARENQTTQKGQKNSRERMKRIEEGIKELGSQILKEHPVENTQLQNEKLYLYYLQNGRDMYVDQELDINRLSDYDVDHIVPQSFLKDDSIDNKVLTRSDKNRGKSDNVPSEEVVKKMKNYWRQLLNAKLITQRKFDNLTKAERGGLSELDKAGFIKRQLVETRQITKHVAQILDSRMNTKYDENDKLIREVKVITLKSKLVSDFRKDFQFYKVREINNYHHAHDAYLNAVVGTALIKKYPKLESEFVYGDYKVYDVRKMIAKSEQEIGKATAKYFFYSNIMNFFKTEITLANGEIRKRPLIETNGETGEIVWDKGRDFATVRKVLSMPQVNIVKKTEVQTGGFSKESILPKRNSDKLIARKKDWDPKKYGGFVSPTVAYSVLVVAKVEKGKSKKLKSVKELLGITIMERSSFEKNPIDFLEAKGYKEVKKDLIIKLPKYSLFELENGRKRMLASARELQKGNELALPSKYVNFLYLASHYEKLKGSPEDNEQKQLFVEQHKHYLDEIIEQISEFSKRVILADANLDKVLSAYNKHRDKPIREQAENIIHLFTLTNLGAPAAFKYFDTTIDRKQYRSTKEVLDATLIHQSITGLYETRIDLSQLGGDEGADKRTADGSEFESPKKKRKV

SEQ ID NO: 350 - protein, 1588 aa, synthetic construct
  REGION 1..1588: note = 10. monoABE8.1_bpNLS +Y147R_Q154R_T166R polypeptide sequence
MSEVEFSHEYWMRHALTLAKRARDEREVPVGAVLVLNNRVIGEGWNRAIGLHDPTAHAEIMALRQGGLVMQNYRLIDATLYVTFEPCVMCAGAMIHSRIGRVVFGVRNAKTGAAGSLMDVLHYPGMNHRVEITEGILADECAALLCRFFRMPRRVFNAQKKAQSSRDSGGSSGGSSGSETPGTSESATPESSGGSSGGSDKKYSIGLAIGTNSVGWAVITDEYKVPSKKFKVLGNTDRHSIKKNLIGALLFDSGETAEATRLKRTARRRYTRRKNRICYLQEIFSNEMAKVDDSFFHRLEESFLVEEDKKHERHPIFGNIVDEVAYHEKYPTIYHLRKKLVDSTDKADLRLIYLALAHMIKFRGHFLIEGDLNPDNSDVDKLFIQLVQTYNQLFEENPINASGVDAKAILSARLSKSRRLENLIAQLPGEKKNGLFGNLIALSLGLTPNFKSNFDLAEDAKLQLSKDTYDDDLDNLLAQIGDQYADLFLAAKNLSDAILLSDILRVNTEITKAPLSASMIKRYDEHHQDLTLLKALVRQQLPEKYKEIFFDQSKNGYAGYIDGGASQEEFYKFIKPILEKMDGTEELLVKLNREDLLRKQRTFDNGSIPHQIHLGELHAILRRQEDFYPFLKDNREKIEKILTFRIPYYVGPLARGNSRFAWMTRKSEETITPWNFEEVVDKGASAQSFIERMTNFDKNLPNEKVLPKHSLLYEYFTVYNELTKVKYVTEGMRKPAFLSGEQKKAIVDLLFKTNRKVTVKQLKEDYFKKIECFDSVEISGVEDRFNASLGTYHDLLKIIKDKDFLDNEENEDILEDIVLTLTLFEDREMIEERLKTYAHLFDDKVMKQLKRRRYTGWGRLSRKLINGIRDKQSGKTILDFLKSDGFANRNFMQLIHDDSLTFKEDIQKAQVSGQGDSLHEHIANLAGSPAIKKGILQTVKVVDELVKVMGRHKPENIVIEMARENQTTQKGQKNSRERMKRIEEGIKELGSQILKEHPVENTQLQNEKLYLYYLQNGRDMYVDQELDINRLSDYDVDHIVPQSFLKDDSIDNKVLTRSDKNRGKSDNVPSEEVVKKMKNYWRQLLNAKLITQRKFDNLTKAERGGLSELDKAGFIKRQLVETRQITKHVAQILDSRMNTKYDENDKLIREVKVITLKSKLVSDFRKDFQFYKVREINNYHHAHDAYLNAVVGTALIKKYPKLESEFVYGDYKVYDVRKMIAKSEQEIGKATAKYFFYSNIMNFFKTEITLANGEIRKRPLIETNGETGEIVWDKGRDFATVRKVLSMPQVNIVKKTEVQTGGFSKESILPKRNSDKLIARKKDWDPKKYGGFVSPTVAYSVLVVAKVEKGKSKKLKSVKELLGITIMERSSFEKNPIDFLEAKGYKEVKKDLIIKLPKYSLFELENGRKRMLASARELQKGNELALPSKYVNFLYLASHYEKLKGSPEDNEQKQLFVEQHKHYLDEIIEQISEFSKRVILADANLDKVLSAYNKHRDKPIREQAENIIHLFTLTNLGAPAAFKYFDTTIDRKQYRSTKEVLDATLIHQSITGLYETRIDLSQLGGDEGADKRTADGSEFESPKKKRKV

SEQ ID NO: 351 - protein, 1588 aa, synthetic construct
  REGION 1..1588: note = 11. monoABE8.1_bpNLS +Y147T_Q154R polypeptide sequence
MSEVEFSHEYWMRHALTLAKRARDEREVPVGAVLVLNNRVIGEGWNRAIGLHDPTAHAEIMALRQGGLVMQNYRLIDATLYVTFEPCVMCAGAMIHSRIGRVVFGVRNAKTGAAGSLMDVLHYPGMNHRVEITEGILADECAALLCTFFRMPRRVFNAQKKAQSSTDSGGSSGGSSGSETPGTSESATPESSGGSSGGSDKKYSIGLAIGTNSVGWAVITDEYKVPSKKFKVLGNTDRHSIKKNLIGALLFDSGETAEATRLKRTARRRYTRRKNRICYLQEIFSNEMAKVDDSFFHRLEESFLVEEDKKHERHPIFGNIVDEVAYHEKYPTIYHLRKKLVDSTDKADLRLIYLALAHMIKFRGHFLIEGDLNPDNSDVDKLFIQLVQTYNQLFEENPINASGVDAKAILSARLSKSRRLENLIAQLPGEKKNGLFGNLIALSLGLTPNFKSNFDLAEDAKLQLSKDTYDDDLDNLLAQIGDQYADLFLAAKNLSDAILLSDILRVNTEITKAPLSASMIKRYDEHHQDLTLLKALVRQQLPEKYKEIFFDQSKNGYAGYIDGGASQEEFYKFIKPILEKMDGTEELLVKLNREDLLRKQRTFDNGSIPHQIHLGELHAILRRQEDFYPFLKDNREKIEKILTFRIPYYVGPLARGNSRFAWMTRKSEETITPWNFEEVVDKGASAQSFIERMTNFDKNLPNEKVLPKHSLLYEYFTVYNELTKVKYVTEGMRKPAFLSGEQKKAIVDLLFKTNRKVTVKQLKEDYFKKIECFDSVEISGVEDRFNASLGTYHDLLKIIKDKDFLDNEENEDILEDIVLTLTLFEDREMIEERLKTYAHLFDDKVMKQLKRRRYTGWGRLSRKLINGIRDKQSGKTILDFLKSDGFANRNFMQLIHDDSLTFKEDIQKAQVSGQGDSLHEHIANLAGSPAIKKGILQTVKVVDELVKVMGRHKPENIVIEMARENQTTQKGQKNSRERMKRIEEGIKELGSQILKEHPVENTQLQNEKLYLYYLQNGRDMYVDQELDINRLSDYDVDHIVPQSFLKDDSIDNKVLTRSDKNRGKSDNVPSEEVVKKMKNYWRQLLNAKLITQRKFDNLTKAERGGLSELDKAGFIKRQLVETRQITKHVAQILDSRMNTKYDENDKLIREVKVITLKSKLVSDFRKDFQFYKVREINNYHHAHDAYLNAVVGTALIKKYPKLESEFVYGDYKVYDVRKMIAKSEQEIGKATAKYFFYSNIMNFFKTEITLANGEIRKRPLIETNGETGEIVWDKGRDFATVRKVLSMPQVNIVKKTEVQTGGFSKESILPKRNSDKLIARKKDWDPKKYGGFVSPTVAYSVLVVAKVEKGKSKKLKSVKELLGITIMERSSFEKNPIDFLEAKGYKEVKKDLIIKLPKYSLFELENGRKRMLASARELQKGNELALPSKYVNFLYLASHYEKLKGSPEDNEQKQLFVEQHKHYLDEIIEQISEFSKRVILADANLDKVLSAYNKHRDKPIREQAENIIHLFTLTNLGAPAAFKYFDTTIDRKQYRSTKEVLDATLIHQSITGLYETRIDLSQLGGDEGADKRTADGSEFESPKKKRKV

SEQ ID NO: 352 - protein, 1588 aa, synthetic construct
  REGION 1..1588: note = 12. monoABE8.1_bpNLS +Y147T_Q154S polypeptide sequence
MSEVEFSHEYWMRHALTLAKRARDEREVPVGAVLVLNNRVIGEGWNRAIGLHDPTAHAEIMALRQGGLVMQNYRLIDATLYVTFEPCVMCAGAMIHSRIGRVVFGVRNAKTGAAGSLMDVLHYPGMNHRVEITEGILADECAALLCTFFRMPRSVFNAQKKAQSSTDSGGSSGGSSGSETPGTSESATPESSGGSSGGSDKKYSIGLAIGTNSVGWAVITDEYKVPSKKFKVLGNTDRHSIKKNLIGALLFDSGETAEATRLKRTARRRYTRRKNRICYLQEIFSNEMAKVDDSFFHRLEESFLVEEDKKHERHPIFGNIVDEVAYHEKYPTIYHLRKKLVDSTDKADLRLIYLALAHMIKFRGHFLIEGDLNPDNSDVDKLFIQLVQTYNQLFEENPINASGVDAKAILSARLSKSRRLENLIAQLPGEKKNGLFGNLIALSLGLTPNFKSNFDLAEDAKLQLSKDTYDDDLDNLLAQIGDQYADLFLAAKNLSDAILLSDILRVNTEITKAPLSASMIKRYDEHHQDLTLLKALVRQQLPEKYKEIFFDQSKNGYAGYIDGGASQEEFYKFIKPILEKMDGTEELLVKLNREDLLRKQRTFDNGSIPHQIHLGELHAILRRQEDFYPFLKDNREKIEKILTFRIPYYVGPLARGNSRFAWMTRKSEETITPWNFEEVVDKGASAQSFIERMTNFDKNLPNEKVLPKHSLLYEYFTVYNELTKVKYVTEGMRKPAFLSGEQKKAIVDLLFKTNRKVTVKQLKEDYFKKIECFDSVEISGVEDRFNASLGTYHDLLKIIKDKDFLDNEENEDILEDIVLTLTLFEDREMIEERLKTYAHLFDDKVMKQLKRRRYTGWGRLSRKLINGIRDKQSGKTILDFLKSDGFANRNFMQLIHDDSLTFKEDIQKAQVSGQGDSLHEHIANLAGSPAIKKGILQTVKVVDELVKVMGRHKPENIVIEMARENQTTQKGQKNSRERMKRIEEGIKELGSQILKEHPVENTQLQNEKLYLYYLQNGRDMYVDQELDINRLSDYDVDHIVPQSFLKDDSIDNKVLTRSDKNRGKSDNVPSEEVVKKMKNYWRQLLNAKLITQRKFDNLTKAERGGLSELDKAGFIKRQLVETRQITKHVAQILDSRMNTKYDENDKLIREVKVITLKSKLVSDFRKDFQFYKVREINNYHHAHDAYLNAVVGTALIKKYPKLESEFVYGDYKVYDVRKMIAKSEQEIGKATAKYFFYSNIMNFFKTEITLANGEIRKRPLIETNGETGEIVWDKGRDFATVRKVLSMPQVNIVKKTEVQTGGFSKESILPKRNSDKLIARKKDWDPKKYGGFVSPTVAYSVLVVAKVEKGKSKKLKSVKELLGITIMERSSFEKNPIDFLEAKGYKEVKKDLIIKLPKYSLFELENGRKRMLASARELQKGNELALPSKYVNFLYLASHYEKLKGSPEDNEQKQLFVEQHKHYLDEIIEQISEFSKRVILADANLDKVLSAYNKHRDKPIREQAENIIHLFTLTNLGAPAAFKYFDTTIDRKQYRSTKEVLDATLIHQSITGLYETRIDLSQLGGDEGADKRTADGSEFESPKKKRKV

SEQ ID NO: 353 - protein, 1588 aa, synthetic construct
  REGION 1..1588: note = 13. monoABE8.1_bpNLS +H123Y123H_Y147R_Q154R_I76Y polypeptide sequence
MSEVEFSHEYWMRHALTLAKRARDEREVPVGAVLVLNNRVIGEGWNRAIGLHDPTAHAEIMALRQGGLVMQNYRLYDATLYVTFEPCVMCAGAMIHSRIGRVVFGVRNAKTGAAGSLMDVLHHPGMNHRVEITEGILADECAALLCRFFRMPRRVFNAQKKAQSSTDSGGSSGGSSGSETPGTSESATPESSGGSSGGSDKKYSIGLAIGTNSVGWAVITDEYKVPSKKFKVLGNTDRHSIKKNLIGALLFDSGETAEATRLKRTARRRYTRRKNRICYLQEIFSNEMAKVDDSFFHRLEESFLVEEDKKHERHPIFGNIVDEVAYHEKYPTIYHLRKKLVDSTDKADLRLIYLALAHMIKFRGHFLIEGDLNPDNSDVDKLFIQLVQTYNQLFEENPINASGVDAKAILSARLSKSRRLENLIAQLPGEKKNGLFGNLIALSLGLTPNFKSNFDLAEDAKLQLSKDTYDDDLDNLLAQIGDQYADLFLAAKNLSDAILLSDILRVNTEITKAPLSASMIKRYDEHHQDLTLLKALVRQQLPEKYKEIFFDQSKNGYAGYIDGGASQEEFYKFIKPILEKMDGTEELLVKLNREDLLRKQRTFDNGSIPHQIHLGELHAILRRQEDFYPFLKDNREKIEKILTFRIPYYVGPLARGNSRFAWMTRKSEETITPWNFEEVVDKGASAQSFIERMTNFDKNLPNEKVLPKHSLLYEYFTVYNELTKVKYVTEGMRKPAFLSGEQKKAIVDLLFKTNRKVTVKQLKEDYFKKIECFDSVEISGVEDRFNASLGTYHDLLKIIKDKDFLDNEENEDILEDIVLTLTLFEDREMIEERLKTYAHLFDDKVMKQLKRRRYTGWGRLSRKLINGIRDKQSGKTILDFLKSDGFANRNFMQLIHDDSLTFKEDIQKAQVSGQGDSLHEHIANLAGSPAIKKGILQTVKVVDELVKVMGRHKPENIVIEMARENQTTQKGQKNSRERMKRIEEGIKELGSQILKEHPVENTQLQNEKLYLYYLQNGRDMYVDQELDINRLSDYDVDHIVPQSFLKDDSIDNKVLTRSDKNRGKSDNVPSEEVVKKMKNYWRQLLNAKLITQRKFDNLTKAERGGLSELDKAGFIKRQLVETRQITKHVAQILDSRMNTKYDENDKLIREVKVITLKSKLVSDFRKDFQFYKVREINNYHHAHDAYLNAVVGTALIKKYPKLESEFVYGDYKVYDVRKMIAKSEQEIGKATAKYFFYSNIMNFFKTEITLANGEIRKRPLIETNGETGEIVWDKGRDFATVRKVLSMPQVNIVKKTEVQTGGFSKESILPKRNSDKLIARKKDWDPKKYGGFVSPTVAYSVLVVAKVEKGKSKKLKSVKELLGITIMERSSFEKNPIDFLEAKGYKEVKKDLIIKLPKYSLFELENGRKRMLASARELQKGNELALPSKYVNFLYLASHYEKLKGSPEDNEQKQLFVEQHKHYLDEIIEQISEFSKRVILADANLDKVLSAYNKHRDKPIREQAENIIHLFTLTNLGAPAAFKYFDTTIDRKQYRSTKEVLDATLIHQSITGLYETRIDLSQLGGDEGADKRTADGSEFESPKKKRKV

SEQ ID NO: 354 - protein, 1588 aa, synthetic construct
  REGION 1..1588: note = 14. monoABE8.1_bpNLS + V82S +Q154R polypeptide sequence
MSEVEFSHEYWMRHALTLAKRARDEREVPVGAVLVLNNRVIGEGWNRAIGLHDPTAHAEIMALRQGGLVMQNYRLIDATLYSTFEPCVMCAGAMIHSRIGRVVFGVRNAKTGAAGSLMDVLHYPGMNHRVEITEGILADECAALLCYFFRMPRRVFNAQKKAQSSTDSGGSSGGSSGSETPGTSESATPESSGGSSGGSDKKYSIGLAIGTNSVGWAVITDEYKVPSKKFKVLGNTDRHSIKKNLIGALLFDSGETAEATRLKRTARRRYTRRKNRICYLQEIFSNEMAKVDDSFFHRLEESFLVEEDKKHERHPIFGNIVDEVAYHEKYPTIYHLRKKLVDSTDKADLRLIYLALAHMIKFRGHFLIEGDLNPDNSDVDKLFIQLVQTYNQLFEENPINASGVDAKAILSARLSKSRRLENLIAQLPGEKKNGLFGNLIALSLGLTPNFKSNFDLAEDAKLQLSKDTYDDDLDNLLAQIGDQYADLFLAAKNLSDAILLSDILRVNTEITKAPLSASMIKRYDEHHQDLTLLKALVRQQLPEKYKEIFFDQSKNGYAGYIDGGASQEEFYKFIKPILEKMDGTEELLVKLNREDLLRKQRTFDNGSIPHQIHLGELHAILRRQEDFYPFLKDNREKIEKILTFRIPYYVGPLARGNSRFAWMTRKSEETITPWNFEEVVDKGASAQSFIERMTNFDKNLPNEKVLPKHSLLYEYFTVYNELTKVKYVTEGMRKPAFLSGEQKKAIVDLLFKTNRKVTVKQLKEDYFKKIECFDSVEISGVEDRFNASLGTYHDLLKIIKDKDFLDNEENEDILEDIVLTLTLFEDREMIEERLKTYAHLFDDKVMKQLKRRRYTGWGRLSRKLINGIRDKQSGKTILDFLKSDGFANRNFMQLIHDDSLTFKEDIQKAQVSGQGDSLHEHIANLAGSPAIKKGILQTVKVVDELVKVMGRHKPENIVIEMARENQTTQKGQKNSRERMKRIEEGIKELGSQILKEHPVENTQLQNEKLYLYYLQNGRDMYVDQELDINRLSDYDVDHIVPQSFLKDDSIDNKVLTRSDKNRGKSDNVPSEEVVKKMKNYWRQLLNAKLITQRKFDNLTKAERGGLSELDKAGFIKRQLVETRQITKHVAQILDSRMNTKYDENDKLIREVKVITLKSKLVSDFRKDFQFYKVREINNYHHAHDAYLNAVVGTALIKKYPKLESEFVYGDYKVYDVRKMIAKSEQEIGKATAKYFFYSNIMNFFKTEITLANGEIRKRPLIETNGETGEIVWDKGRDFATVRKVLSMPQVNIVKKTEVQTGGFSKESILPKRNSDKLIARKKDWDPKKYGGFVSPTVAYSVLVVAKVEKGKSKKLKSVKELLGITIMERSSFEKNPIDFLEAKGYKEVKKDLIIKLPKYSLFELENGRKRMLASARELQKGNELALPSKYVNFLYLASHYEKLKGSPEDNEQKQLFVEQHKHYLDEIIEQISEFSKRVILADANLDKVLSAYNKHRDKPIREQAENIIHLFTLTNLGAPAAFKYFDTTIDRKQYRSTKEVLDATLIHQSITGLYETRIDLSQLGGDEGADKRTADGSEFESPKKKRKV

SEQ ID NO: 355 - protein, 4 aa, synthetic construct
  REGION 1..4: note = synthetic peptide sequence
SGGS

SEQ ID NO: 356 - protein, 24 aa, synthetic construct
  REGION 1..24: note = synthetic peptide sequence
SGGSSGSETPGTSESATPESSGGS

SEQ ID NO: 357 - protein, 32 aa, synthetic construct
  REGION 1..32: note = synthetic polypeptide sequence
SGGSSGGSSGSETPGTSESATPESSGGSSGGS

SEQ ID NO: 358 - protein, 104 aa, synthetic construct
  REGION 1..104: note = synthetic polypeptide sequence
GGSGGSPGSPAGSPTSTEEGTSESATPESGPGTSTEPSEGSAPGSPAGSPTSTEEGTSTEPSEGSAPGTSTEPSEGSAPGTSESATPESGPGSEPATSGGSGGS

SEQ ID NO: 359 - protein, 24 aa, synthetic construct
  REGION 1..24: note = synthetic peptide sequence
SGGSSGGSSGSETPGTSESATPES

SEQ ID NO: 360 - protein, 40 aa, synthetic construct
  REGION 1..40: note = synthetic polypeptide sequence
SGGSSGGSSGSETPGTSESATPESSGGSSGGSSGGSSGGS

SEQ ID NO: 361 - protein, 64 aa, synthetic construct
  REGION 1..64: note = synthetic polypeptide sequence
SGGSSGGSSGSETPGTSESATPESSGGSSGGSSGGSSGGSSGSETPGTSESATPESSGGSSGGS

SEQ ID NO: 362 - protein, 92 aa, synthetic construct
  REGION 1..92: note = synthetic polypeptide sequence
PGSPAGSPTSTEEGTSESATPESGPGTSTEPSEGSAPGSPAGSPTSTEEGTSTEPSEGSAPGTSTEPSEGSAPGTSESATPESGPGSEPATS

SEQ ID NO: 363 - protein, 5 aa, synthetic construct
  REGION 1..5: note = synthetic peptide sequence
PAPAP

SEQ ID NO: 364 - protein, 6 aa, synthetic construct
  REGION 1..6: note = synthetic peptide sequence
PAPAPA

SEQ ID NO: 365 - protein, 7 aa, synthetic construct
  REGION 1..7: note = synthetic peptide sequence
PAPAPAP

SEQ ID NO: 366 - protein, 8 aa, synthetic construct
  REGION 1..8: note = synthetic peptide sequence
PAPAPAPA

SEQ ID NO: 367 - protein, 9 aa, synthetic construct
  REGION 1..9: note = synthetic peptide sequence
PAPAPAPAP

SEQ ID NO: 368 - protein, 15 aa, synthetic construct
  REGION 1..15: note = synthetic peptide sequence
PAPAPAPAPAPAPAP

SEQ ID NO: 369 - protein, 21 aa, synthetic construct
  REGION 1..21: note = synthetic peptide sequence
PAPAPAPAPAPAPAPAPAPAP

SEQ ID NO: 370 - protein, 190 aa, Hepatitis B virus
MPLSYQHFRRLLLLDDEAGPLEEELPRLADEGLNRRVAEDLNLGNLNVSIPWTHKVGNFTGLYSSTVPVFNPHWKTPSFPNIHLHQDIIKKCEQFVGPLTVNEKRRLQLIMPARFYPKVTKYLPLDKGIKPYYPEHLVNHYFQTRHYLHTLWKAGILYKRETTHSASFCGSPYSWEQDLQHGAESFHQQS

SEQ ID NO: 371 - protein, 832 aa, Hepatitis B virus
MPLSYQHFRKLLLLDDEAGPLEEELPRLADEGLNRRVAEDLNLGNLNVSIPWTHKVGNFTGLYSSTVPVFNPHWKTPSFPNIHLHQDIIKKCEQFVGPLTVNEKRRLQLIMPARFYPKVTKYLPLDKGIKPYYPEHLVNHYFQTRHYLHTLWKAGILYKRETTHSASFCGSPYSWEQDLQHGAESFHQQSSGILSRPPVGSSLQSKHSKSRLGLQSQQGHLARRQQGRSWSIRAGFHPTARRPFGVEPSGSGHTTNFASKSASCLHQSPDRKAAYPAVSTFEKHSSSGHAVEFHNLSPNSARSQSERPVFPCWWLQFRSSKPCSDYCLSLIVNLLEDWGPCAEHGEHHIRIPRTPSRVTGGVFLVDKNPHNTAESRLVVDFSQFSRGNYRVSWPKFAVPNLQSLTNLLSSNLSWLSLDVSAAFYHLPLHPAAMPHLLVGSSGLSRYVARLSSNSRILNHQHGTMPNLHDYCSRNLYVSLLLLYQTFGRKLHLYSHPIILGFRKIPMGVGLSPFLLAQFTSAICSVVRRAFPHCLAFSYMDDVVLGAKSVQHLESLFTAVTNFLLSLGIHLNPNKTKRWGYSLNFMGYVIGSYGSLPQEHIIQKIKECFRKLPINRPIDWKVCQRIVGLLGFAAPFTQCGYPALMPLYACIQSKQAFTFSPTYKAFLCKQYLNLYPVARQRPGLCQVFADATPTGWGLVMGHQRVRGTFSAPLPIHTAELLAACFARSRSGANIIGTDNSVVLSRKYTSYPWLLGCAANWILRGTSFVYVPSALNPADDPSRGRLGLSRPLLRLPFRPTTGRTSLYADSPSVPSHLPDRVHFASPLHVAWRPP

SEQ ID NO: 372 - protein, 226 aa, Hepatitis B virus
MENITSGFLGPLLVLQAGFFLLTRILTIPQSLDSWWTSLNFLGGTTVCLGQNSQSPTSNHSPTSCPPTCPGYRWMCLRRFIIFLFILLLCLIFLLVLLDYQGMLPVCPLIPGSSTTSTGPCRTCMTTAQGTSMYPSCCCTKPSDGNCTCIPIPSSWAFGKFLWEWASARFSWLSLLVPFVQWFVGLSPTVWLSVIWMMWYWGPSLYSILSPFLPLLPIFFCLWVYI

SEQ ID NO: 373 - protein, 154 aa, Hepatitis B virus
MAARLCCQLDPARDVLCLRPVGAESCGRPFSGSLGTLSSPSPSAVPTDHGAHLSLRGLPVCAFSSAGPCALRFTSARRMETTVNAHRMLPKVLHKRTLGLSAMSTTDLEAYFKDCLFKDWEELGEEIRLKVFVLGGCRHKLVCAPAPCNFFTSA

SEQ ID NO: 374 - protein, 183 aa, Hepatitis B virus
MDIDPYKEFGASVELLSFLPSDFFPSIRDLLDTASALYREALESPEHCSPHHTALRQAILCWGELMNLATWVGSNLEDPASRELVVSYVNVNMGLKIRQLLWFHISCLTFGRETVLEYLVSFGVWIRTPPAYRPPNAPILSTLPETTVVRRRGRSPRRRTPSPRRRRSQSPRRRRSQSRESQC

SEQ ID NO: 375 - protein, 154 aa, Hepatitis B virus
  SITE 66: note = misc_feature - Xaa can be any naturally occurring amino acid
  SITE 118: note = misc_feature - Xaa can be any naturally occurring amino acid
  SITE 127: note = misc_feature - Xaa can be any naturally occurring amino acid
MAARLCCQLDPARDVLCLRPVGAESRGRPLPGPLGALPPASPPVVPSDHGAHLSLRGLPVCAFSSXGPCALRFTSARRMETTVNAHRNLPKVLHKRTLGLSAMSTTDLEAYFKDCVFXEWEELGEEXRLKVFVLGGCRHKLVCSPAPCNFFTSA

SEQ ID NO: 376 - protein, 154 aa, Hepatitis B virus
MAARVCCQLDPARDVLCLRPVGAESRGRPVSGPFGPLPSPSSSAVPADYGAHLSLRGLPVCAFSSAGPCALRFTSARRMETTVNAHQVLPKLLHKRTLGLSAMSTTDLEAYFKDCLFKDWEELGEEIRLKVFVLGGCRHKLVCSPAPCNFFTSA

SEQ ID NO: 377 - protein, 226 aa, Hepatitis B virus
MENTTSGFLGPLLVLQAGFFLLTRNLTIPQSLDSWWTSLNFLGGAPTCPGQNSQSPTSNHSPTSCPPICPGYRWMCLRRFIIFLFILLLCLIFLLVLLDYQGMLPVCPLLPGTSTTSTGPCKTCTIPAQGTSMFPSCCCTKPSDGNCTCIPIPSSWAFARFLWEWASVRFSWLSLLVPFVQWFVGLSPTVWLSVIWMMWYWGPSLYNILSPFLPLLPIFFCLWVYI

SEQ ID NO: 378 - DNA, 3182 bp, Hepatitis B virus
  source 1..3182: mol_type = genomic DNA
aattccacaacctttcaccaaactctgcaagatcccagagtgagaggcctgtatttccctgctggtggctccagttcaggagcagtaaaccctgttccgactactgcctctcccttatcgtcaatcttctcgaggattggggaccctgcgctgaacatggagaacatcacatcaggattcctaggaccccttctcgtgttacaggcggggtttttcttgttgacaagaatcctcacaataccgcagagtctagactcgtggtggacttctctcaattttctagggggaactaccgtgtgtcttggccaaaattcgcagtccccaacctccaatcactcaccaacctcctgtcctccaacttgtcctggttatcgctggatgtgtctgcggcgttttatcatcttcctcttcatcctgctgctatgcctcatcttcttgttggttcttctggactatcaaggtatgttgcccgtttgtcctctaattccaggatcctcaaccaccagcacgggaccatgccgaacctgcatgactactgctcaaggaacctctatgtatccctcctgttgctgtaccaaaccttcggacggaaattgcacctgtattcccatcccatcatcctgggctttcggaaaattcctatgggagtgggcctcagcccgtttctcctggctcagtttactagtgccatttgttcagtggttcgtagggctttcccccactgtttggctttcagttatatggatgatgtggtattgggggccaagtctgtacagcatcttgagtccctttttaccgctgttaccaattttcttttgtctttgggtatacatttaaaccctaacaaaacaaagagatggggttactctctgaattttatgggttatgtcattggaagttatgggtccttgccacaagaacacatcatacaaaaaatcaaagaatgttttagaaaacttcctattaacaggcctattgattggaaagtatgtcaacgaattgtgggtcttttgggttttgctgccccatttacacaatgtggttatcctgcgttaatgcccttgtatgcatgtattcaatctaagcaggctttcactttctcgccaacttacaaggcctttctgtgtaaacaatacctgaacctttaccccgttgcccggcaacggccaggtctgtgccaagtgtttgctgacgcaacccccactggctggggcttggtcatgggccatcagcgcgtgcgtggaaccttttcggctcctctgccgatccatactgcggaactcctagccgcttgttttgctcgcagcaggtctggagcaaacattatcgggactgataactctgttgtcctctcccgcaaatatacatcgtatccatggctgctaggctgtgctgccaactggatcctgcgcgggacgtcctttgtttacgtcccgtcggcgctgaatcctgcggacgacccttctcggggtcgcttgggactctctcgtccccttctccgtctgccgttccgaccgaccacggggcgcacctctctttacgcggactccccgtctgtgccttctcatctgccggaccgtgtgcacttcgcttcacctctgcacgtcgcatggagaccaccgtgaacgcccaccgaatgttgcccaaggtcttacataagaggactcttggactctctgcaatgtcaacgaccgaccttgaggcatacttcaaagactgtttgtttaaagactgggaggagttgggggaggagattagattaaaggtctttgtactaggaggctgtaggcataaattggtctgcgcaccagcaccatgcaactttttcacctctgcctaatcatctcttgttcatgtcctactgttcaagcctccaagctgtgccttgggtggctttggggcatggacatcgacccttataaagaatttggagctactgtggagttactctcgtttttgccttctgacttctttccttcagtacgagatcttctagataccgcctcagctctgtatcgggaagccttagagtctcctgagcattgttcacctcaccatactgcactcaggcaagcaattctttgctggggggaactaatgactctagctacctgggtgggtgttaatttggaagatccagcatctagagacctagtagtcagttatgtcaacactaatatgggcctaaagttcaggcaactcttgtggtttcacatttcttgtctcacttttggaagagaaaccgttatagagtatttggtgtctttcggagtgtggattcgcactcctccagcttatagaccaccaaatgcccctatcctatcaacacttccggaaactactgttgttagacgacgaggcaggtcccctagaagaagaactccctcgcctcgcagacgaaggtctcaatcgccgcgtcgcagaagatctcaatctcgggaacctcaatgttagtattccttggactcataaggtggggaactttactggtctttattcttctactgtacctgtctttaatcctcattggaaaacaccatcttttcctaatatacatttacaccaagacattatcaaaaaatgtgaacagtttgtaggcccacttacagttaatgagaaaagaagattgcaattgattatgcctgctaggttttatccaaaggttaccaaatatttaccattggataagggtattaaaccttattatccagaacatctagttaatcattacttccaaactagacactatttacacactctatggaaggcgggtatattatataagagagaaacaacacatagcgcctcattttgtgggtcaccatattcttgggaacaagatctacagcatggggcagaatctttccaccagcaatcctctgggattctttcccgaccaccagttggatccagccttcagagcaaacacagcaaatccagattgggacttcaatcccaacaaggacacctggccagacgccaacaaggtaggagctggagcattcgggctgggtttcaccccaccgcacggaggccttttggggtggagccctcaggctcagggcatactacaaactttgccagcaaatccgcctcctgcctccaccaatcgccagacaggaaggcagcctaccccgctgtctccacctttgagaaacactcatcctcaggccatgcagtgg

SEQ ID NO: 379 - RNA, 117 nt, synthetic construct
  misc_feature 1..117: note = Description of artificial sequence: synthetic polynucleotidesequence
  modified_base 1: mod_base = gm
  modified_base 1..3: mod_base = OTHER; note = 3'-phosphorothioate modification
  modified_base 2..3: mod_base = um
  source 1..117: mol_type = other RNA
gttctgtcttttggtcaggacaaccgtctagctataagtgctgcagggtgtgagaaactcctattgctggacgatgtctcttacgaggcattagcacacaagaatcctcacaatacc

SEQ ID NO: 380 - RNA, 117 nt, synthetic construct
  misc_feature 1..117: note = Description of artificial sequence: synthetic polynucleotidesequence
  modified_base 1: mod_base = gm
  modified_base 2..3: mod_base = um
  modified_base 2..3: mod_base = OTHER; note = 3'-phosphorothioate modification
  source 1..117: mol_type = other RNA
gttctgtcttttggtcaggacaaccgtctagctataagtgctgcagggtgtgagaaactcctattgctggacgatgtctcttacgaggcattagcactcgctggatgtgtctgcggc

SEQ ID NO: 381 - RNA, 117 nt, synthetic construct
  misc_feature 1..117: note = Description of artificial sequence: synthetic polynucleotidesequence
  modified_base 1: mod_base = gm
  modified_base 1..3: mod_base = OTHER; note = 3'-phosphorothioate modification
  modified_base 2..3: mod_base = um
  source 1..117: mol_type = other RNA
gttctgtcttttggtcaggacaaccgtctagctataagtgctgcagggtgtgagaaactcctattgctggacgatgtctcttacgaggcattagcaccacctgtattcccatcccat

SEQ ID NO: 382 - RNA, 117 nt, synthetic construct
  misc_feature 1..117: note = Description of artificial sequence: synthetic polynucleotidesequence
  modified_base 1: mod_base = gm
  modified_base 1..3: mod_base = OTHER; note = 3'-phosphorothioate modification
  modified_base 2..3: mod_base = um
  source 1..117: mol_type = other RNA
gttctgtcttttggtcaggacaaccgtctagctataagtgctgcagggtgtgagaaactcctattgctggacgatgtctcttacgaggcattagcacggggccaagtctgtacagca

SEQ ID NO: 383 - RNA, 117 nt, synthetic construct
  misc_feature 1..117: note = Description of artificial sequence: synthetic polynucleotidesequence
  modified_base 1: mod_base = gm
  modified_base 1..3: mod_base = OTHER; note = 3'-phosphorothioate modification
  modified_base 2..3: mod_base = um
  source 1..117: mol_type = other RNA
gttctgtcttttggtcaggacaaccgtctagctataagtgctgcagggtgtgagaaactcctattgctggacgatgtctcttacgaggcattagcacgctgacgcaacccccactgg

SEQ ID NO: 384 - RNA, 117 nt, synthetic construct
  misc_feature 1..117: note = Description of artificial sequence: synthetic polynucleotidesequence
  modified_base 1: mod_base = gm
  modified_base 1..3: mod_base = OTHER; note = 3'-phosphorothioate modification
  modified_base 2..3: mod_base = um
  source 1..117: mol_type = other RNA
gttctgtcttttggtcaggacaaccgtctagctataagtgctgcagggtgtgagaaactcctattgctggacgatgtctcttacgaggcattagcacggagctactgtggagttact

SEQ ID NO: 385 - RNA, 117 nt, synthetic construct
  misc_feature 1..117: note = Description of artificial sequence: synthetic polynucleotidesequence
  modified_base 1: mod_base = gm
  modified_base 1..3: mod_base = OTHER; note = 3'-phosphorothioate modification
  modified_base 2..3: mod_base = um
  source 1..117: mol_type = other RNA
gttctgtcttttggtcaggacaaccgtctagctataagtgctgcagggtgtgagaaactcctattgctggacgatgtctcttacgaggcattagcacttcttctaggggacctgcct

SEQ ID NO: 386 - RNA, 117 nt, synthetic construct
  misc_feature 1..117: note = Description of artificial sequence: synthetic polynucleotidesequence
  modified_base 1: mod_base = gm
  modified_base 1..3: mod_base = OTHER; note = 3'-phosphorothioate modification
  modified_base 2..3: mod_base = um
  source 1..117: mol_type = other RNA
gttctgtcttttggtcaggacaaccgtctagctataagtgctgcagggtgtgagaaactcctattgctggacgatgtctcttacgaggcattagcacgaggacaaacgggcaacata

SEQ ID NO: 387 - RNA, 117 nt, synthetic construct
  misc_feature 1..117: note = Description of artificial sequence: synthetic polynucleotidesequence
  modified_base 1: mod_base = gm
  modified_base 1..3: mod_base = OTHER; note = 3'-phosphorothioate modification
  modified_base 2..3: mod_base = um
  source 1..117: mol_type = other RNA
gttctgtcttttggtcaggacaaccgtctagctataagtgctgcagggtgtgagaaactcctattgctggacgatgtctcttacgaggcattagcacttgtcaacaagaaaaacccc

SEQ ID NO: 388 - RNA, 117 nt, synthetic construct
  misc_feature 1..117: note = Description of artificial sequence: synthetic polynucleotidesequence
  modified_base 1: mod_base = gm
  modified_base 1..3: mod_base = OTHER; note = 3'-phosphorothioate modification
  modified_base 2..3: mod_base = um
  source 1..117: mol_type = other RNA
gttctgtcttttggtcaggacaaccgtctagctataagtgctgcagggtgtgagaaactcctattgctggacgatgtctcttacgaggcattagcaccccaaggtcttacataagag

SEQ ID NO: 389 - RNA, 117 nt, synthetic construct
  misc_feature 1..117: note = Description of artificial sequence: synthetic polynucleotidesequence
  modified_base 1: mod_base = gm
  modified_base 1..3: mod_base = OTHER; note = 3'-phosphorothioate modification
  modified_base 2..3: mod_base = um
  source 1..117: mol_type = other RNA
gttctgtcttttggtcaggacaaccgtctagctataagtgctgcagggtgtgagaaactcctattgctggacgatgtctcttacgaggcattagcacccgggcaacggggtaaaggt

SEQ ID NO: 390 - RNA, 117 nt, synthetic construct
  misc_feature 1..117: note = Description of artificial sequence: synthetic polynucleotidesequence
  modified_base 1: mod_base = gm
  modified_base 1..3: mod_base = OTHER; note = 3'-phosphorothioate modification
  modified_base 2..3: mod_base = um
  source 1..117: mol_type = other RNA
gttctgtcttttggtcaggacaaccgtctagctataagtgctgcagggtgtgagaaactcctattgctggacgatgtctcttacgaggcattagcacacacagaaaggccttgtaag

SEQ ID NO: 391 - RNA, 117 nt, synthetic construct
  misc_feature 1..117: note = Description of artificial sequence: synthetic polynucleotidesequence
  modified_base 1: mod_base = gm
  modified_base 1..3: mod_base = OTHER; note = 3'-phosphorothioate modification
  modified_base 2..3: mod_base = um
  source 1..117: mol_type = other RNA
gttctgtcttttggtcaggacaaccgtctagctataagtgctgcagggtgtgagaaactcctattgctggacgatgtctcttacgaggcattagcaccacgcacgcgctgatggccc

SEQ ID NO: 392 - DNA, 20 bp, synthetic construct
  source 1..20: mol_type = other DNA
acaagaatcctcacaatacc

SEQ ID NO: 393 - DNA, 20 bp, synthetic construct
  source 1..20: mol_type = other DNA
tcgctggatgtgtctgcggc

SEQ ID NO: 394 - DNA, 20 bp, synthetic construct
  source 1..20: mol_type = other DNA
cacctgtattcccatcccat

SEQ ID NO: 395 - DNA, 20 bp, synthetic construct
  source 1..20: mol_type = other DNA
ggggccaagtctgtacagca

SEQ ID NO: 396 - DNA, 20 bp, synthetic construct
  source 1..20: mol_type = other DNA
gctgacgcaacccccactgg

SEQ ID NO: 397 - DNA, 20 bp, synthetic construct
  source 1..20: mol_type = other DNA
ggagctactgtggagttact

SEQ ID NO: 398 - DNA, 20 bp, synthetic construct
  source 1..20: mol_type = other DNA
ttcttctaggggacctgcct

SEQ ID NO: 399 - DNA, 20 bp, synthetic construct
  source 1..20: mol_type = other DNA
gaggacaaacgggcaacata

SEQ ID NO: 400 - DNA, 20 bp, synthetic construct
  source 1..20: mol_type = other DNA
ttgtcaacaagaaaaacccc

SEQ ID NO: 401 - DNA, 20 bp, synthetic construct
  source 1..20: mol_type = other DNA
cccaaggtcttacataagag

SEQ ID NO: 402 - DNA, 20 bp, synthetic construct
  source 1..20: mol_type = other DNA
ccgggcaacggggtaaaggt

SEQ ID NO: 403 - DNA, 20 bp, synthetic construct
  source 1..20: mol_type = other DNA
acacagaaaggccttgtaag

SEQ ID NO: 404 - DNA, 20 bp, synthetic construct
  source 1..20: mol_type = other DNA
cacgcacgcgctgatggccc

SEQ ID NO: 405 - RNA, 20 nt, synthetic construct
  source 1..20: mol_type = other RNA
acaagaatcctcacaatacc

SEQ ID NO: 406 - RNA, 20 nt, synthetic construct
  source 1..20: mol_type = other RNA
tcgctggatgtgtctgcggc

SEQ ID NO: 407 - RNA, 20 nt, synthetic construct
  source 1..20: mol_type = other RNA
cacctgtattcccatcccat

SEQ ID NO: 408 - RNA, 20 nt, synthetic construct
  source 1..20: mol_type = other RNA
ggggccaagtctgtacagca

SEQ ID NO: 409 - RNA, 20 nt, synthetic construct
  source 1..20: mol_type = other RNA
gctgacgcaacccccactgg

SEQ ID NO: 410 - RNA, 20 nt, synthetic construct
  source 1..20: mol_type = other RNA
ggagctactgtggagttact

SEQ ID NO: 411 - RNA, 20 nt, synthetic construct
  source 1..20: mol_type = other RNA
ttcttctaggggacctgcct

SEQ ID NO: 412 - RNA, 20 nt, synthetic construct
  source 1..20: mol_type = other RNA
gaggacaaacgggcaacata

SEQ ID NO: 413 - RNA, 20 nt, synthetic construct
  source 1..20: mol_type = other RNA
ttgtcaacaagaaaaacccc

SEQ ID NO: 414 - RNA, 20 nt, synthetic construct
  source 1..20: mol_type = other RNA
cccaaggtcttacataagag

SEQ ID NO: 415 - RNA, 20 nt, synthetic construct
  source 1..20: mol_type = other RNA
ccgggcaacggggtaaaggt

SEQ ID NO: 416 - RNA, 20 nt, synthetic construct
  source 1..20: mol_type = other RNA
acacagaaaggccttgtaag

SEQ ID NO: 417 - RNA, 20 nt, synthetic construct
  source 1..20: mol_type = other RNA
cacgcacgcgctgatggccc

SEQ ID NO: 418 - protein, 1326 aa, synthetic construct
MSEVEFSHEYWMRHALTLAKRARDEREVPVGAVLVLNNRVIGEGWNRAIGLHDPTAHAEIMALRQGGLVMQNYRLYDATLYVTFEPCVMCAGAMIHSRIGRVVFGVRNAKTGAAGSLMDVLHHPGMNHRVEITEGILADECAALLCRFFRMPRRVFNAQKKAQSSTDGSSGSETPGTSESATPESSGAPKKKRKVGIHGVPAAATRSFILKIEPNEEVKKGLWKTHEVLNHGIAYYMNILKLIRQEAIYEHHEQDPKNPKKVSKAEIQAELWDFVLKMQKCNSFTHEVDKDEVFNILRELYEELVPSSVEKKGEANQLSNKFLYPLVDPNSQSGKGTASSGRKPRWYNLKIAGDPSWEEEKKKWEEDKKKDPLAKILGKLAEYGLIPLFIPYTDSNEPIVKEIKWMEKSRNQSVRRLDKDMFIQALERFLSWESWNLKVKEEYEKVEKEYKTLEERIKEDIQALKALEQYEKERQEQLLRDTLNTNEYRLSKRGLRGWREIIQKWLKMDENEPSEKYLEVFKDYQRKHPREAGDYSVYEFLSKKENHFIWRNHPEYPYLYATFCEIDKKKKDAKQQATFTLADPINHPLWVRFEERSGSNLNKYRILTEQLHTEKLKKKLTVQLDRLIYPTESGGWEEKGKVDIVLLPSRQFYNQIFLDIEEKGKHAFTYKDESIKFPLKGTLGGARVQFDRDHLRRYPHKVESGNVGRIYFNMTVNIEPTESPVSKSLKIHRDDFPKVVNFKPKELTEWIKDSKGKKLKSGIESLEIGLRVMSIALGQRQAAAASIFEVVDQKPDIEGKLFFPIKGTELYAVHRASFNIKLPGETLVKSREVLRKAREDNLKLMNQKLNFLRNVLHFQQFEDITEREKRVTKWISRQENSDVPLVYQDELIQIRELMYKPYKDWVAFLKQLHKRLEVEIGKEVKHWRKSLSDGRKGLYGISLKNIDEIDRTRKFLLRWSLRPTEPGEVRRLEPGQRFAIDQLNHLNALKEDRLKKMANTIIMHALGYCYDVRKKKWQAKNPACQIILFEDLSNYNPYKERSRFENSRLMKWSRREIPRQVALQGEIYGLQVGEVGAQFSSRFHAKTGSPGIRCRVVTKEKLQDNRFFKNLQREGRLTLDKIAVLKEGDLYPDKGGEKFISLSKDRKCVTTHADINAAQNLQKRFWTRTHGFYKVYCKAYQVDGQTVYIPESKDQKQKIIEEFGEGYFILKDGVYEWVNAGKLKIKKGSSKQSSSELVDSDILKDSFDLASELKGEKLMLYRDPSGNVFPSDKWMAAGVFFGKLERILISKLTNQYSISTIEDDSSKQSMKRPAATKKAGQAKKKK

SEQ ID NO: 419 - RNA, 100 nt, synthetic construct
  source 1..100: mol_type = other RNA
gacttctctcaattttctaggttttagagctagaaatagcaagttaaaataaggctagtccgttatcaacttgaaaaagtggcaccgagtcggtgctttt

SEQ ID NO: 420 - RNA, 100 nt, synthetic construct
  source 1..100: mol_type = other RNA
tcaatcccaacaaggacaccgttttagagctagaaatagcaagttaaaataaggctagtccgttatcaacttgaaaaagtggcaccgagtcggtgctttt

SEQ ID NO: 421 - RNA, 100 nt, synthetic construct
  source 1..100: mol_type = other RNA
tcctctgccgatccatactggttttagagctagaaatagcaagttaaaataaggctagtccgttatcaacttgaaaaagtggcaccgagtcggtgctttt

SEQ ID NO: 422 - RNA, 100 nt, synthetic construct
  source 1..100: mol_type = other RNA
ccatgccccaaagccacccagttttagagctagaaatagcaagttaaaataaggctagtccgttatcaacttgaaaaagtggcaccgagtcggtgctttt

SEQ ID NO: 423 - RNA, 100 nt, synthetic construct
  source 1..100: mol_type = other RNA
gctgccaactggatcctgcggttttagagctagaaatagcaagttaaaataaggctagtccgttatcaacttgaaaaagtggcaccgagtcggtgctttt

SEQ ID NO: 424 - RNA, 100 nt, synthetic construct
  source 1..100: mol_type = other RNA
gaaagcccaggatgatgggagttttagagctagaaatagcaagttaaaataaggctagtccgttatcaacttgaaaaagtggcaccgagtcggtgctttt

SEQ ID NO: 425 - RNA, 100 nt, synthetic construct
  source 1..100: mol_type = other RNA
tccgcagtatggatcggcaggttttagagctagaaatagcaagttaaaataaggctagtccgttatcaacttgaaaaagtggcaccgagtcggtgctttt

SEQ ID NO: 426 - DNA, 21 bp, synthetic construct
  source 1..21: mol_type = other DNA
aaggcacagcttggaggcttg

SEQ ID NO: 427 - DNA, 21 bp, synthetic construct
  source 1..21: mol_type = other DNA
gaactccctcgcctcgcagac

SEQ ID NO: 428 - DNA, 20 bp, synthetic construct
  source 1..20: mol_type = other DNA
gaagaactccctcgcctcgc

SEQ ID NO: 429 - DNA, 20 bp, synthetic construct
  source 1..20: mol_type = other DNA
gacttctctcaattttctag

SEQ ID NO: 430 - DNA, 21 bp, synthetic construct
  source 1..21: mol_type = other DNA
gctgctatgcctcatcttctt

SEQ ID NO: 431 - DNA, 20 bp, synthetic construct
  source 1..20: mol_type = other DNA
ggacttctctcaattttcta

SEQ ID NO: 432 - DNA, 21 bp, synthetic construct
  source 1..21: mol_type = other DNA
gtccaccacgagtctagactc

SEQ ID NO: 433 - DNA, 21 bp, synthetic construct
  source 1..21: mol_type = other DNA
taaaacgccgcagacacatcc

SEQ ID NO: 434 - DNA, 20 bp, synthetic construct
  source 1..20: mol_type = other DNA
tccgcagtatggatcggcag

SEQ ID NO: 435 - DNA, 21 bp, synthetic construct
  source 1..21: mol_type = other DNA
accaatttatgcctacagcct

SEQ ID NO: 436 - DNA, 20 bp, synthetic construct
  source 1..20: mol_type = other DNA
tcctctgccgatccatactg

SEQ ID NO: 437 - DNA, 20 bp, synthetic construct
  source 1..20: mol_type = other DNA
tggacttctctcaattttct

SEQ ID NO: 438 - DNA, 21 bp, synthetic construct
  source 1..21: mol_type = other DNA
ttcaagcctccaagctgtgcc

SEQ ID NO: 439 - DNA, 20 bp, synthetic construct
  source 1..20: mol_type = other DNA
tttgctgacgcaacccccac

SEQ ID NO: 440 - DNA, 20 bp, synthetic construct
  source 1..20: mol_type = other DNA
tactaacattgaggttcccg

SEQ ID NO: 441 - DNA, 20 bp, synthetic construct
  source 1..20: mol_type = other DNA
aggaggctgtaggcataaat

SEQ ID NO: 442 - DNA, 20 bp, synthetic construct
  source 1..20: mol_type = other DNA
aggagttccgcagtatggat

SEQ ID NO: 443 - DNA, 20 bp, synthetic construct
  source 1..20: mol_type = other DNA
caaggcacagcttggaggct

SEQ ID NO: 444 - DNA, 20 bp, synthetic construct
  source 1..20: mol_type = other DNA
ccgcagtatggatcggcaga

SEQ ID NO: 445 - DNA, 20 bp, synthetic construct
  source 1..20: mol_type = other DNA
cctctgccgatccatactgc

SEQ ID NO: 446 - DNA, 21 bp, synthetic construct
  source 1..21: mol_type = other DNA
ctagactcgtggtggacttct

SEQ ID NO: 447 - DNA, 20 bp, synthetic construct
  source 1..20: mol_type = other DNA
cgcccaccgaatgttgccca

SEQ ID NO: 448 - DNA, 20 bp, synthetic construct
  source 1..20: mol_type = other DNA
ctcctcccagtctttaaaca

SEQ ID NO: 449 - DNA, 21 bp, synthetic construct
  source 1..21: mol_type = other DNA
actcctcccagtctttaaaca

SEQ ID NO: 450 - DNA, 21 bp, synthetic construct
  source 1..21: mol_type = other DNA
caataccgcagagtctagact

SEQ ID NO: 451 - DNA, 20 bp, synthetic construct
  source 1..20: mol_type = other DNA
aataccgcagagtctagact

SEQ ID NO: 452 - DNA, 21 bp, synthetic construct
  source 1..21: mol_type = other DNA
ccccagcaaagaattgcttgc

SEQ ID NO: 453 - DNA, 20 bp, synthetic construct
  source 1..20: mol_type = other DNA
cccagcaaagaattgcttgc

SEQ ID NO: 454 - DNA, 21 bp, synthetic construct
  source 1..21: mol_type = other DNA
cccacccaggtagctagagtc

SEQ ID NO: 455 - DNA, 20 bp, synthetic construct
  source 1..20: mol_type = other DNA
ccacccaggtagctagagtc

SEQ ID NO: 456 - DNA, 21 bp, synthetic construct
  source 1..21: mol_type = other DNA
gaatccacactccgaaagaca

SEQ ID NO: 457 - DNA, 20 bp, synthetic construct
  source 1..20: mol_type = other DNA
aatccacactccgaaagaca

SEQ ID NO: 458 - DNA, 20 bp, synthetic construct
  source 1..20: mol_type = other DNA
gtctcaatcgccgcgtcgca

SEQ ID NO: 459 - DNA, 21 bp, synthetic construct
  source 1..21: mol_type = other DNA
ggtctcaatcgccgcgtcgca

SEQ ID NO: 460 - DNA, 21 bp, synthetic construct
  source 1..21: mol_type = other DNA
gaagatctcaatctcgggaac

SEQ ID NO: 461 - DNA, 20 bp, synthetic construct
  source 1..20: mol_type = other DNA
aagatctcaatctcgggaac

SEQ ID NO: 462 - DNA, 20 bp, synthetic construct
  source 1..20: mol_type = other DNA
ttttccaatgaggattaaag

SEQ ID NO: 463 - DNA, 21 bp, synthetic construct
  source 1..21: mol_type = other DNA
gttttccaatgaggattaaag

SEQ ID NO: 464 - DNA, 20 bp, synthetic construct
  source 1..20: mol_type = other DNA
tttacaccaagacattatca

SEQ ID NO: 465 - DNA, 21 bp, synthetic construct
  source 1..21: mol_type = other DNA
atttacaccaagacattatca

SEQ ID NO: 466 - DNA, 21 bp, synthetic construct
  source 1..21: mol_type = other DNA
tgaacagtttgtaggcccact

SEQ ID NO: 467 - DNA, 20 bp, synthetic construct
  source 1..20: mol_type = other DNA
gaacagtttgtaggcccact

SEQ ID NO: 468 - DNA, 21 bp, synthetic construct
  source 1..21: mol_type = other DNA
gattgcaattgattatgcctg

SEQ ID NO: 469 - DNA, 20 bp, synthetic construct
  source 1..20: mol_type = other DNA
attgcaattgattatgcctg

SEQ ID NO: 470 - DNA, 20 bp, synthetic construct
  source 1..20: mol_type = other DNA
tgccaactggatcctgcgcg

SEQ ID NO: 471 - DNA, 20 bp, synthetic construct
  source 1..20: mol_type = other DNA
cgccttccatagagtgtgta

SEQ ID NO: 472 - DNA, 21 bp, synthetic construct
  source 1..21: mol_type = other DNA
ccgccttccatagagtgtgta

SEQ ID NO: 473 - DNA, 20 bp, synthetic construct
  source 1..20: mol_type = other DNA
gctgccaactggatcctgcg

SEQ ID NO: 474 - DNA, 20 bp, synthetic construct
  source 1..20: mol_type = other DNA
ctgccaactggatcctgcgc

SEQ ID NO: 475 - DNA, 20 bp, synthetic construct
  source 1..20: mol_type = other DNA
tccaccacgagtctagactc

SEQ ID NO: 476 - DNA, 21 bp, synthetic construct
  source 1..21: mol_type = other DNA
tcccaagaatatggtgaccca

SEQ ID NO: 477 - DNA, 20 bp, synthetic construct
  source 1..20: mol_type = other DNA
cccaagaatatggtgaccca

SEQ ID NO: 478 - DNA, 20 bp, synthetic construct
  source 1..20: mol_type = other DNA
acaagatctacagcatgggg

SEQ ID NO: 479 - DNA, 21 bp, synthetic construct
  source 1..21: mol_type = other DNA
aacaagatctacagcatgggg

SEQ ID NO: 480 - DNA, 21 bp, synthetic construct
  source 1..21: mol_type = other DNA
ccagccttcagagcaaacaca

SEQ ID NO: 481 - DNA, 20 bp, synthetic construct
  source 1..20: mol_type = other DNA
cagccttcagagcaaacaca

SEQ ID NO: 482 - DNA, 21 bp, synthetic construct
  source 1..21: mol_type = other DNA
ttcagagcaaacacagcaaat

SEQ ID NO: 483 - DNA, 20 bp, synthetic construct
  source 1..20: mol_type = other DNA
tcagagcaaacacagcaaat

SEQ ID NO: 484 - DNA, 21 bp, synthetic construct
  source 1..21: mol_type = other DNA
tccccaatcctcgagaagatt

SEQ ID NO: 485 - DNA, 20 bp, synthetic construct
  source 1..20: mol_type = other DNA
ccccaatcctcgagaagatt

SEQ ID NO: 486 - DNA, 20 bp, synthetic construct
  source 1..20: mol_type = other DNA
ccaggacaagttggaggaca

SEQ ID NO: 487 - DNA, 21 bp, synthetic construct
  source 1..21: mol_type = other DNA
accaggacaagttggaggaca

SEQ ID NO: 488 - DNA, 21 bp, synthetic construct
  source 1..21: mol_type = other DNA
tgctgtaccaaaccttcggac

SEQ ID NO: 489 - DNA, 20 bp, synthetic construct
  source 1..20: mol_type = other DNA
gctgtaccaaaccttcggac

SEQ ID NO: 490 - DNA, 20 bp, synthetic construct
  source 1..20: mol_type = other DNA
accccatctctttgttttgt

SEQ ID NO: 491 - DNA, 21 bp, synthetic construct
  source 1..21: mol_type = other DNA
aaccccatctctttgttttgt

SEQ ID NO: 492 - DNA, 21 bp, synthetic construct
  source 1..21: mol_type = other DNA
gccacaagaacacatcataca

SEQ ID NO: 493 - DNA, 20 bp, synthetic construct
  source 1..20: mol_type = other DNA
ccacaagaacacatcataca

SEQ ID NO: 494 - DNA, 21 bp, synthetic construct
  source 1..21: mol_type = other DNA
tactttccaatcaataggcct

SEQ ID NO: 495 - DNA, 20 bp, synthetic construct
  source 1..20: mol_type = other DNA
actttccaatcaataggcct

SEQ ID NO: 496 - DNA, 20 bp, synthetic construct
  source 1..20: mol_type = other DNA
cacatccagcgataaccagg

SEQ ID NO: 497 - DNA, 21 bp, synthetic construct
  source 1..21: mol_type = other DNA
acacatccagcgataaccagg

SEQ ID NO: 498 - DNA, 21 bp, synthetic construct
  source 1..21: mol_type = other DNA
tgtcaacgaattgtgggtctt

SEQ ID NO: 499 - DNA, 20 bp, synthetic construct
  source 1..20: mol_type = other DNA
gtcaacgaattgtgggtctt

SEQ ID NO: 500 - DNA, 21 bp, synthetic construct
  source 1..21: mol_type = other DNA
tacacaatgtggttatcctgc

SEQ ID NO: 501 - DNA, 20 bp, synthetic construct
  source 1..20: mol_type = other DNA
acacaatgtggttatcctgc

SEQ ID NO: 502 - DNA, 20 bp, synthetic construct
  source 1..20: mol_type = other DNA
cggcaacggccaggtctgtg

SEQ ID NO: 503 - DNA, 21 bp, synthetic construct
  source 1..21: mol_type = other DNA
ccggcaacggccaggtctgtg

SEQ ID NO: 504 - DNA, 21 bp, synthetic construct
  source 1..21: mol_type = other DNA
ggtggtctccatgcgacgtgc

SEQ ID NO: 505 - DNA, 20 bp, synthetic construct
  source 1..20: mol_type = other DNA
taccgcagagtctagactcg

SEQ ID NO: 506 - DNA, 20 bp, synthetic construct
  source 1..20: mol_type = other DNA
cgcagagtctagactcgtgg

SEQ ID NO: 507 - DNA, 20 bp, synthetic construct
  source 1..20: mol_type = other DNA
caccacgagtctagactctg

SEQ ID NO: 508 - DNA, 20 bp, synthetic construct
  source 1..20: mol_type = other DNA
gaaagcccaggatgatggga

SEQ ID NO: 509 - DNA, 20 bp, synthetic construct
  source 1..20: mol_type = other DNA
ccacccaaggcacagcttgg

SEQ ID NO: 510 - DNA, 20 bp, synthetic construct
  source 1..20: mol_type = other DNA
aagccacccaaggcacagct

SEQ ID NO: 511 - DNA, 21 bp, synthetic construct
  source 1..21: mol_type = other DNA
gaaagcccaggatgatgggat

SEQ ID NO: 512 - DNA, 20 bp, synthetic construct
  source 1..20: mol_type = other DNA
aaagcccaggatgatgggat

SEQ ID NO: 513 - DNA, 20 bp, synthetic construct
  source 1..20: mol_type = other DNA
ccatgccccaaagccaccca

SEQ ID NO: 514 - DNA, 20 bp, synthetic construct
  source 1..20: mol_type = other DNA
tcaggcaagcaattctttgc

SEQ ID NO: 515 - DNA, 20 bp, synthetic construct
  source 1..20: mol_type = other DNA
caggcaagcaattctttgct

SEQ ID NO: 516 - DNA, 20 bp, synthetic construct
  source 1..20: mol_type = other DNA
aggcaagcaattctttgctg

SEQ ID NO: 517 - DNA, 20 bp, synthetic construct
  source 1..20: mol_type = other DNA
ggcaagcaattctttgctgg

SEQ ID NO: 518 - DNA, 20 bp, synthetic construct
  source 1..20: mol_type = other DNA
gcaagcaattctttgctggg

SEQ ID NO: 519 - DNA, 20 bp, synthetic construct
  source 1..20: mol_type = other DNA
tccaaggaatactaacattg

SEQ ID NO: 520 - DNA, 20 bp, synthetic construct
  source 1..20: mol_type = other DNA
ttccaatgaggattaaagac

SEQ ID NO: 521 - DNA, 20 bp, synthetic construct
  source 1..20: mol_type = other DNA
tgcaattgattatgcctgct

SEQ ID NO: 522 - DNA, 20 bp, synthetic construct
  source 1..20: mol_type = other DNA
tgggaacaagatctacagca

SEQ ID NO: 523 - DNA, 20 bp, synthetic construct
  source 1..20: mol_type = other DNA
cgaaccactgaacaaatggc

SEQ ID NO: 524 - DNA, 21 bp, synthetic construct
  source 1..21: mol_type = other DNA
acgaaccactgaacaaatggc

SEQ ID NO: 525 - DNA, 20 bp, synthetic construct
  source 1..20: mol_type = other DNA
gggaacaagatctacagcat

SEQ ID NO: 526 - DNA, 20 bp, synthetic construct
  source 1..20: mol_type = other DNA
ggaacaagatctacagcatg

SEQ ID NO: 527 - DNA, 20 bp, synthetic construct
  source 1..20: mol_type = other DNA
tcaatcccaacaaggacacc

SEQ ID NO: 528 - DNA, 20 bp, synthetic construct
  source 1..20: mol_type = other DNA
gacgccaacaaggtaggagc

SEQ ID NO: 529 - DNA, 20 bp, synthetic construct
  source 1..20: mol_type = other DNA
tgctccagctcctaccttgt

SEQ ID NO: 530 - DNA, 20 bp, synthetic construct
  source 1..20: mol_type = other DNA
ccaccaatcgccagacagga

SEQ ID NO: 531 - DNA, 20 bp, synthetic construct
  source 1..20: mol_type = other DNA
agccaccagcagggaaatac

SEQ ID NO: 532 - DNA, 20 bp, synthetic construct
  source 1..20: mol_type = other DNA
accaggacaagttggaggac

SEQ ID NO: 533 - DNA, 20 bp, synthetic construct
  source 1..20: mol_type = other DNA
cgataaccaggacaagttgg

SEQ ID NO: 534 - DNA, 20 bp, synthetic construct
  source 1..20: mol_type = other DNA
cccatctctttgttttgtta

SEQ ID NO: 535 - DNA, 21 bp, synthetic construct
  source 1..21: mol_type = other DNA
catccatataactgaaagcca

SEQ ID NO: 536 - DNA, 20 bp, synthetic construct
  source 1..20: mol_type = other DNA
atccatataactgaaagcca

SEQ ID NO: 537 - DNA, 20 bp, synthetic construct
  source 1..20: mol_type = other DNA
ccccatctctttgttttgtt

SEQ ID NO: 538 - DNA, 20 bp, synthetic construct
  source 1..20: mol_type = other DNA
tcaacgaattgtgggtcttt

SEQ ID NO: 539 - DNA, 20 bp, synthetic construct
  source 1..20: mol_type = other DNA
caacgaattgtgggtctttt

SEQ ID NO: 540 - DNA, 20 bp, synthetic construct
  source 1..20: mol_type = other DNA
ggtctccatgcgacgtgcag

SEQ ID NO: 541 - DNA, 20 bp, synthetic construct
  source 1..20: mol_type = other DNA
acaggcggggtttttcttgt

SEQ ID NO: 542 - DNA, 20 bp, synthetic construct
  source 1..20: mol_type = other DNA
gcagagtctagactcgtggt

SEQ ID NO: 543 - DNA, 20 bp, synthetic construct
  source 1..20: mol_type = other DNA
gagaagtccaccacgagtct

SEQ ID NO: 544 - DNA, 20 bp, synthetic construct
  source 1..20: mol_type = other DNA
gacacatccagcgataacca

SEQ ID NO: 545 - DNA, 20 bp, synthetic construct
  source 1..20: mol_type = other DNA
aagcccaggatgatgggatg

SEQ ID NO: 546 - DNA, 20 bp, synthetic construct
  source 1..20: mol_type = other DNA
ccactcccataggaattttc

SEQ ID NO: 547 - DNA, 21 bp, synthetic construct
  source 1..21: mol_type = other DNA
tatacccaaagacaaaagaaa

SEQ ID NO: 548 - DNA, 20 bp, synthetic construct
  source 1..20: mol_type = other DNA
atacccaaagacaaaagaaa

SEQ ID NO: 549 - DNA, 20 bp, synthetic construct
  source 1..20: mol_type = other DNA
ctgagccaggagaaacgggc

SEQ ID NO: 550 - DNA, 20 bp, synthetic construct
  source 1..20: mol_type = other DNA
taccacatcatccatataac

SEQ ID NO: 551 - DNA, 20 bp, synthetic construct
  source 1..20: mol_type = other DNA
agccacccaaggcacagctt

SEQ ID NO: 552 - DNA, 20 bp, synthetic construct
  source 1..20: mol_type = other DNA
ccagcaaagaattgcttgcc

SEQ ID NO: 553 - DNA, 20 bp, synthetic construct
  source 1..20: mol_type = other DNA
gacgacgaggcaggtcccct

SEQ ID NO: 554 - DNA, 20 bp, synthetic construct
  source 1..20: mol_type = other DNA
gacgaggcaggtcccctaga

SEQ ID NO: 555 - DNA, 20 bp, synthetic construct
  source 1..20: mol_type = other DNA
ggtctcaatcgccgcgtcgc

SEQ ID NO: 556 - DNA, 20 bp, synthetic construct
  source 1..20: mol_type = other DNA
ctcaatcgccgcgtcgcaga

SEQ ID NO: 557 - DNA, 20 bp, synthetic construct
  source 1..20: mol_type = other DNA
agtccaaggaatactaacat

SEQ ID NO: 558 - DNA, 20 bp, synthetic construct
  source 1..20: mol_type = other DNA
tgttttccaatgaggattaa

SEQ ID NO: 559 - DNA, 21 bp, synthetic construct
  source 1..21: mol_type = other DNA
catgcaactttttcacctctg

SEQ ID NO: 560 - DNA, 20 bp, synthetic construct
  source 1..20: mol_type = other DNA
atgcaactttttcacctctg

SEQ ID NO: 561 - DNA, 20 bp, synthetic construct
  source 1..20: mol_type = other DNA
tttccaccagcaatcctctg

SEQ ID NO: 562 - DNA, 20 bp, synthetic construct
  source 1..20: mol_type = other DNA
cccaacaaggacacctggcc

SEQ ID NO: 563 - DNA, 20 bp, synthetic construct
  source 1..20: mol_type = other DNA
acgccaacaaggtaggagct

SEQ ID NO: 564 - DNA, 20 bp, synthetic construct
  source 1..20: mol_type = other DNA
cctccaccaatcgccagaca

SEQ ID NO: 565 - DNA, 20 bp, synthetic construct
  source 1..20: mol_type = other DNA
ccaatcctcgagaagattga

SEQ ID NO: 566 - DNA, 20 bp, synthetic construct
  source 1..20: mol_type = other DNA
tccccaatcctcgagaagat

SEQ ID NO: 567 - DNA, 20 bp, synthetic construct
  source 1..20: mol_type = other DNA
agggtccccaatcctcgaga

SEQ ID NO: 568 - DNA, 20 bp, synthetic construct
  source 1..20: mol_type = other DNA
cttctctcaattttctaggg

SEQ ID NO: 569 - DNA, 20 bp, synthetic construct
  source 1..20: mol_type = other DNA
gataaccaggacaagttgga

SEQ ID NO: 570 - DNA, 20 bp, synthetic construct
  source 1..20: mol_type = other DNA
tcaagcctccaagctgtgcc

SEQ ID NO: 571 - DNA, 20 bp, synthetic construct
  source 1..20: mol_type = other DNA
ccaccagcacgggaccatgc

SEQ ID NO: 572 - DNA, 20 bp, synthetic construct
  source 1..20: mol_type = other DNA
ctccatgcgacgtgcagagg

SEQ ID NO: 573 - DNA, 20 bp, synthetic construct
  source 1..20: mol_type = other DNA
gtggtctccatgcgacgtgc

SEQ ID NO: 574 - DNA, 20 bp, synthetic construct
  source 1..20: mol_type = other DNA
tatggatgatgtggtattgg

SEQ ID NO: 575 - RNA, 21 nt, synthetic construct
  source 1..21: mol_type = other RNA
aaggcacagcttggaggcttg

SEQ ID NO: 576 - RNA, 21 nt, synthetic construct
  source 1..21: mol_type = other RNA
gaactccctcgcctcgcagac

SEQ ID NO: 577 - RNA, 20 nt, synthetic construct
  source 1..20: mol_type = other RNA
gaagaactccctcgcctcgc

SEQ ID NO: 578 - RNA, 20 nt, synthetic construct
  source 1..20: mol_type = other RNA
gacttctctcaattttctag

SEQ ID NO: 579 - RNA, 21 nt, synthetic construct
  source 1..21: mol_type = other RNA
gctgctatgcctcatcttctt

SEQ ID NO: 580 - RNA, 20 nt, synthetic construct
  source 1..20: mol_type = other RNA
ggacttctctcaattttcta

SEQ ID NO: 581 - RNA, 21 nt, synthetic construct
  source 1..21: mol_type = other RNA
gtccaccacgagtctagactc

SEQ ID NO: 582 - RNA, 21 nt, synthetic construct
  source 1..21: mol_type = other RNA
taaaacgccgcagacacatcc

SEQ ID NO: 583 - RNA, 20 nt, synthetic construct
  source 1..20: mol_type = other RNA
tccgcagtatggatcggcag

SEQ ID NO: 584 - RNA, 21 nt, synthetic construct
  source 1..21: mol_type = other RNA
accaatttatgcctacagcct

SEQ ID NO: 585 - RNA, 20 nt, synthetic construct
  source 1..20: mol_type = other RNA
tcctctgccgatccatactg

SEQ ID NO: 586 - RNA, 20 nt, synthetic construct
  source 1..20: mol_type = other RNA
tggacttctctcaattttct

SEQ ID NO: 587 - RNA, 21 nt, synthetic construct
  source 1..21: mol_type = other RNA
ttcaagcctccaagctgtgcc

SEQ ID NO: 588 - RNA, 20 nt, synthetic construct
  source 1..20: mol_type = other RNA
tttgctgacgcaacccccac

SEQ ID NO: 589 - RNA, 20 nt, synthetic construct
  source 1..20: mol_type = other RNA
tactaacattgaggttcccg

SEQ ID NO: 590 - RNA, 20 nt, synthetic construct
  source 1..20: mol_type = other RNA
aggaggctgtaggcataaat

SEQ ID NO: 591 - RNA, 20 nt, synthetic construct
  source 1..20: mol_type = other RNA
aggagttccgcagtatggat

SEQ ID NO: 592 - RNA, 20 nt, synthetic construct
  source 1..20: mol_type = other RNA
caaggcacagcttggaggct

SEQ ID NO: 593 - RNA, 20 nt, synthetic construct
  source 1..20: mol_type = other RNA
ccgcagtatggatcggcaga

SEQ ID NO: 594 - RNA, 20 nt, synthetic construct
  source 1..20: mol_type = other RNA
cctctgccgatccatactgc

SEQ ID NO: 595 - RNA, 21 nt, synthetic construct
  source 1..21: mol_type = other RNA
ctagactcgtggtggacttct

SEQ ID NO: 596 - RNA, 20 nt, synthetic construct
  source 1..20: mol_type = other RNA
cgcccaccgaatgttgccca

SEQ ID NO: 597 - RNA, 20 nt, synthetic construct
  source 1..20: mol_type = other RNA
ctcctcccagtctttaaaca

SEQ ID NO: 598 - RNA, 21 nt, synthetic construct
  source 1..21: mol_type = other RNA
actcctcccagtctttaaaca

SEQ ID NO: 599 - RNA, 21 nt, synthetic construct
  source 1..21: mol_type = other RNA
caataccgcagagtctagact

SEQ ID NO: 600 - RNA, 20 nt, synthetic construct
  source 1..20: mol_type = other RNA
aataccgcagagtctagact

SEQ ID NO: 601 - RNA, 21 nt, synthetic construct
  source 1..21: mol_type = other RNA
ccccagcaaagaattgcttgc

SEQ ID NO: 602 - RNA, 20 nt, synthetic construct
  source 1..20: mol_type = other RNA
cccagcaaagaattgcttgc

SEQ ID NO: 603 - RNA, 21 nt, synthetic construct
  source 1..21: mol_type = other RNA
cccacccaggtagctagagtc

SEQ ID NO: 604 - RNA, 20 nt, synthetic construct
  source 1..20: mol_type = other RNA
ccacccaggtagctagagtc

SEQ ID NO: 605 - RNA, 21 nt, synthetic construct
  source 1..21: mol_type = other RNA
gaatccacactccgaaagaca

SEQ ID NO: 606 - RNA, 20 nt, synthetic construct
  source 1..20: mol_type = other RNA
aatccacactccgaaagaca

SEQ ID NO: 607 - RNA, 20 nt, synthetic construct
  source 1..20: mol_type = other RNA
gtctcaatcgccgcgtcgca

SEQ ID NO: 608 - RNA, 21 nt, synthetic construct
  source 1..21: mol_type = other RNA
ggtctcaatcgccgcgtcgca

SEQ ID NO: 609 - RNA, 21 nt, synthetic construct
  source 1..21: mol_type = other RNA
gaagatctcaatctcgggaac

SEQ ID NO: 610 - RNA, 20 nt, synthetic construct
  source 1..20: mol_type = other RNA
aagatctcaatctcgggaac

SEQ ID NO: 611 - RNA, 20 nt, synthetic construct
  source 1..20: mol_type = other RNA
ttttccaatgaggattaaag

SEQ ID NO: 612 - RNA, 21 nt, synthetic construct
  source 1..21: mol_type = other RNA
gttttccaatgaggattaaag

SEQ ID NO: 613 - RNA, 20 nt, synthetic construct
  source 1..20: mol_type = other RNA
tttacaccaagacattatca

SEQ ID NO: 614 - RNA, 21 nt, synthetic construct
  source 1..21: mol_type = other RNA
atttacaccaagacattatca

SEQ ID NO: 615 - RNA, 21 nt, synthetic construct
  source 1..21: mol_type = other RNA
tgaacagtttgtaggcccact

SEQ ID NO: 616 - RNA, 20 nt, synthetic construct
  source 1..20: mol_type = other RNA
gaacagtttgtaggcccact

SEQ ID NO: 617 - RNA, 21 nt, synthetic construct
  source 1..21: mol_type = other RNA
gattgcaattgattatgcctg

SEQ ID NO: 618 - RNA, 20 nt, synthetic construct
  source 1..20: mol_type = other RNA
attgcaattgattatgcctg

SEQ ID NO: 619 - RNA, 20 nt, synthetic construct
  source 1..20: mol_type = other RNA
tgccaactggatcctgcgcg

SEQ ID NO: 620 - RNA, 20 nt, synthetic construct
  source 1..20: mol_type = other RNA
cgccttccatagagtgtgta

SEQ ID NO: 621 - RNA, 21 nt, synthetic construct
  source 1..21: mol_type = other RNA
ccgccttccatagagtgtgta

SEQ ID NO: 622 - RNA, 20 nt, synthetic construct
  source 1..20: mol_type = other RNA
gctgccaactggatcctgcg

SEQ ID NO: 623 - RNA, 20 nt, synthetic construct
  source 1..20: mol_type = other RNA
ctgccaactggatcctgcgc

SEQ ID NO: 624 - RNA, 20 nt, synthetic construct
  source 1..20: mol_type = other RNA
tccaccacgagtctagactc

SEQ ID NO: 625 - RNA, 21 nt, synthetic construct
  source 1..21: mol_type = other RNA
tcccaagaatatggtgaccca

SEQ ID NO: 626 - RNA, 20 nt, synthetic construct
  source 1..20: mol_type = other RNA
cccaagaatatggtgaccca

SEQ ID NO: 627 - RNA, 20 nt, synthetic construct
  source 1..20: mol_type = other RNA
acaagatctacagcatgggg

SEQ ID NO: 628 - RNA, 21 nt, synthetic construct
  source 1..21: mol_type = other RNA
aacaagatctacagcatgggg

SEQ ID NO: 629 - RNA, 21 nt, synthetic construct
  source 1..21: mol_type = other RNA
ccagccttcagagcaaacaca

SEQ ID NO: 630 - RNA, 20 nt, synthetic construct
  source 1..20: mol_type = other RNA
cagccttcagagcaaacaca

SEQ ID NO: 631 - RNA, 21 nt, synthetic construct
  source 1..21: mol_type = other RNA
ttcagagcaaacacagcaaat

SEQ ID NO: 632 - RNA, 20 nt, synthetic construct
  source 1..20: mol_type = other RNA
tcagagcaaacacagcaaat

SEQ ID NO: 633 - RNA, 21 nt, synthetic construct
  source 1..21: mol_type = other RNA
tccccaatcctcgagaagatt

SEQ ID NO: 634 - RNA, 20 nt, synthetic construct
  source 1..20: mol_type = other RNA
ccccaatcctcgagaagatt

SEQ ID NO: 635 - RNA, 20 nt, synthetic construct
  source 1..20: mol_type = other RNA
ccaggacaagttggaggaca

SEQ ID NO: 636 - RNA, 21 nt, synthetic construct
  source 1..21: mol_type = other RNA
accaggacaagttggaggaca

SEQ ID NO: 637 - RNA, 21 nt, synthetic construct
  source 1..21: mol_type = other RNA
tgctgtaccaaaccttcggac

SEQ ID NO: 638 - RNA, 20 nt, synthetic construct
  source 1..20: mol_type = other RNA
gctgtaccaaaccttcggac

SEQ ID NO: 639 - RNA, 20 nt, synthetic construct
  source 1..20: mol_type = other RNA
accccatctctttgttttgt

SEQ ID NO: 640 - RNA, 21 nt, synthetic construct
  source 1..21: mol_type = other RNA
aaccccatctctttgttttgt

SEQ ID NO: 641 - RNA, 21 nt, synthetic construct
  source 1..21: mol_type = other RNA
gccacaagaacacatcataca

SEQ ID NO: 642 - RNA, 20 nt, synthetic construct
  source 1..20: mol_type = other RNA
ccacaagaacacatcataca

SEQ ID NO: 643 - RNA, 21 nt, synthetic construct
  source 1..21: mol_type = other RNA
tactttccaatcaataggcct

SEQ ID NO: 644 - RNA, 20 nt, synthetic construct
  source 1..20: mol_type = other RNA
actttccaatcaataggcct

SEQ ID NO: 645 - RNA, 20 nt, synthetic construct
  source 1..20: mol_type = other RNA
cacatccagcgataaccagg

SEQ ID NO: 646 - RNA, 21 nt, synthetic construct
  source 1..21: mol_type = other RNA
acacatccagcgataaccagg

SEQ ID NO: 647 - RNA, 21 nt, synthetic construct
  source 1..21: mol_type = other RNA
tgtcaacgaattgtgggtctt

SEQ ID NO: 648 - RNA, 20 nt, synthetic construct
  source 1..20: mol_type = other RNA
gtcaacgaattgtgggtctt

SEQ ID NO: 649 - RNA, 21 nt, synthetic construct
  source 1..21: mol_type = other RNA
tacacaatgtggttatcctgc

SEQ ID NO: 650 - RNA, 20 nt, synthetic construct
  source 1..20: mol_type = other RNA
acacaatgtggttatcctgc

SEQ ID NO: 651 - RNA, 20 nt, synthetic construct
  source 1..20: mol_type = other RNA
cggcaacggccaggtctgtg

SEQ ID NO: 652 - RNA, 21 nt, synthetic construct
  source 1..21: mol_type = other RNA
ccggcaacggccaggtctgtg

SEQ ID NO: 653 - RNA, 21 nt, synthetic construct
  source 1..21: mol_type = other RNA
ggtggtctccatgcgacgtgc

SEQ ID NO: 654 - RNA, 20 nt, synthetic construct
  source 1..20: mol_type = other RNA
taccgcagagtctagactcg

SEQ ID NO: 655 - RNA, 20 nt, synthetic construct
  source 1..20: mol_type = other RNA
cgcagagtctagactcgtgg

SEQ ID NO: 656 - RNA, 20 nt, synthetic construct
  source 1..20: mol_type = other RNA
caccacgagtctagactctg

SEQ ID NO: 657 - RNA, 20 nt, synthetic construct
  source 1..20: mol_type = other RNA
gaaagcccaggatgatggga

SEQ ID NO: 658 - RNA, 20 nt, synthetic construct
  source 1..20: mol_type = other RNA
ccacccaaggcacagcttgg

SEQ ID NO: 659 - RNA, 20 nt, synthetic construct
  source 1..20: mol_type = other RNA
aagccacccaaggcacagct

SEQ ID NO: 660 - RNA, 21 nt, synthetic construct
  source 1..21: mol_type = other RNA
gaaagcccaggatgatgggat

SEQ ID NO: 661 - RNA, 20 nt, synthetic construct
  source 1..20: mol_type = other RNA
aaagcccaggatgatgggat

SEQ ID NO: 662 - RNA, 20 nt, synthetic construct
  source 1..20: mol_type = other RNA
ccatgccccaaagccaccca

SEQ ID NO: 663 - RNA, 20 nt, synthetic construct
  source 1..20: mol_type = other RNA
tcaggcaagcaattctttgc

SEQ ID NO: 664 - RNA, 20 nt, synthetic construct
  source 1..20: mol_type = other RNA
caggcaagcaattctttgct

SEQ ID NO: 665 - RNA, 20 nt, synthetic construct
  source 1..20: mol_type = other RNA
aggcaagcaattctttgctg

SEQ ID NO: 666 - RNA, 20 nt, synthetic construct
  source 1..20: mol_type = other RNA
ggcaagcaattctttgctgg

SEQ ID NO: 667 - RNA, 20 nt, synthetic construct
  source 1..20: mol_type = other RNA
gcaagcaattctttgctggg

SEQ ID NO: 668 - RNA, 20 nt, synthetic construct
  source 1..20: mol_type = other RNA
tccaaggaatactaacattg

SEQ ID NO: 669 - RNA, 20 nt, synthetic construct
  source 1..20: mol_type = other RNA
ttccaatgaggattaaagac

SEQ ID NO: 670 - RNA, 20 nt, synthetic construct
  source 1..20: mol_type = other RNA
tgcaattgattatgcctgct

SEQ ID NO: 671 - RNA, 20 nt, synthetic construct
  source 1..20: mol_type = other RNA
tgggaacaagatctacagca

SEQ ID NO: 672 - RNA, 20 nt, synthetic construct
  source 1..20: mol_type = other RNA
cgaaccactgaacaaatggc

SEQ ID NO: 673 - RNA, 21 nt, synthetic construct
  source 1..21: mol_type = other RNA
acgaaccactgaacaaatggc

SEQ ID NO: 674 - RNA, 20 nt, synthetic construct
  source 1..20: mol_type = other RNA
gggaacaagatctacagcat

SEQ ID NO: 675 - RNA, 20 nt, synthetic construct
  source 1..20: mol_type = other RNA
ggaacaagatctacagcatg

SEQ ID NO: 676 - RNA, 20 nt, synthetic construct
  source 1..20: mol_type = other RNA
tcaatcccaacaaggacacc

SEQ ID NO: 677 - RNA, 20 nt, synthetic construct
  source 1..20: mol_type = other RNA
gacgccaacaaggtaggagc

SEQ ID NO: 678 - RNA, 20 nt, synthetic construct
  source 1..20: mol_type = other RNA
tgctccagctcctaccttgt

SEQ ID NO: 679 - RNA, 20 nt, synthetic construct
  source 1..20: mol_type = other RNA
ccaccaatcgccagacagga

SEQ ID NO: 680 - RNA, 20 nt, synthetic construct
  source 1..20: mol_type = other RNA
agccaccagcagggaaatac

SEQ ID NO: 681 - RNA, 20 nt, synthetic construct
  source 1..20: mol_type = other RNA
accaggacaagttggaggac

SEQ ID NO: 682 - RNA, 20 nt, synthetic construct
  source 1..20: mol_type = other RNA
cgataaccaggacaagttgg

SEQ ID NO: 683 - RNA, 20 nt, synthetic construct
  source 1..20: mol_type = other RNA
cccatctctttgttttgtta

SEQ ID NO: 684 - RNA, 21 nt, synthetic construct
  source 1..21: mol_type = other RNA
catccatataactgaaagcca

SEQ ID NO: 685 - RNA, 20 nt, synthetic construct
  source 1..20: mol_type = other RNA
atccatataactgaaagcca

SEQ ID NO: 686 - RNA, 20 nt, synthetic construct
  source 1..20: mol_type = other RNA
ccccatctctttgttttgtt

SEQ ID NO: 687 - RNA, 20 nt, synthetic construct
  source 1..20: mol_type = other RNA
tcaacgaattgtgggtcttt

SEQ ID NO: 688 - RNA, 20 nt, synthetic construct
  source 1..20: mol_type = other RNA
caacgaattgtgggtctttt

SEQ ID NO: 689 - RNA, 20 nt, synthetic construct
  source 1..20: mol_type = other RNA
ggtctccatgcgacgtgcag

SEQ ID NO: 690 - RNA, 20 nt, synthetic construct
  source 1..20: mol_type = other RNA
acaggcggggtttttcttgt

SEQ ID NO: 691 - RNA, 20 nt, synthetic construct
  source 1..20: mol_type = other RNA
gcagagtctagactcgtggt

SEQ ID NO: 692 - RNA, 20 nt, synthetic construct
  source 1..20: mol_type = other RNA
gagaagtccaccacgagtct

SEQ ID NO: 693 - RNA, 20 nt, synthetic construct
  source 1..20: mol_type = other RNA
gacacatccagcgataacca

SEQ ID NO: 694 - RNA, 20 nt, synthetic construct
  source 1..20: mol_type = other RNA
aagcccaggatgatgggatg

SEQ ID NO: 695 - RNA, 20 nt, synthetic construct
  source 1..20: mol_type = other RNA
ccactcccataggaattttc

SEQ ID NO: 696 - RNA, 21 nt, synthetic construct
  source 1..21: mol_type = other RNA
tatacccaaagacaaaagaaa

SEQ ID NO: 697 - RNA, 20 nt, synthetic construct
  source 1..20: mol_type = other RNA
atacccaaagacaaaagaaa

SEQ ID NO: 698 - RNA, 20 nt, synthetic construct
  source 1..20: mol_type = other RNA
ctgagccaggagaaacgggc

SEQ ID NO: 699 - RNA, 20 nt, synthetic construct
  source 1..20: mol_type = other RNA
taccacatcatccatataac

SEQ ID NO: 700 - RNA, 20 nt, synthetic construct
  source 1..20: mol_type = other RNA
agccacccaaggcacagctt

SEQ ID NO: 701 - RNA, 20 nt, synthetic construct
  source 1..20: mol_type = other RNA
ccagcaaagaattgcttgcc

SEQ ID NO: 702 - RNA, 20 nt, synthetic construct
  source 1..20: mol_type = other RNA
gacgacgaggcaggtcccct

SEQ ID NO: 703 - RNA, 20 nt, synthetic construct
  source 1..20: mol_type = other RNA
gacgaggcaggtcccctaga

SEQ ID NO: 704 - RNA, 20 nt, synthetic construct
  source 1..20: mol_type = other RNA
ggtctcaatcgccgcgtcgc

SEQ ID NO: 705 - RNA, 20 nt, synthetic construct
  source 1..20: mol_type = other RNA
ctcaatcgccgcgtcgcaga

SEQ ID NO: 706 - RNA, 20 nt, synthetic construct
  source 1..20: mol_type = other RNA
agtccaaggaatactaacat

SEQ ID NO: 707 - RNA, 20 nt, synthetic construct
  source 1..20: mol_type = other RNA
tgttttccaatgaggattaa

SEQ ID NO: 708 - RNA, 21 nt, synthetic construct
  source 1..21: mol_type = other RNA
catgcaactttttcacctctg

SEQ ID NO: 709 - RNA, 20 nt, synthetic construct
  source 1..20: mol_type = other RNA
atgcaactttttcacctctg

SEQ ID NO: 710 - RNA, 20 nt, synthetic construct
  source 1..20: mol_type = other RNA
tttccaccagcaatcctctg

SEQ ID NO: 711 - RNA, 20 nt, synthetic construct
  source 1..20: mol_type = other RNA
cccaacaaggacacctggcc

SEQ ID NO: 712 - RNA, 20 nt, synthetic construct
  source 1..20: mol_type = other RNA
acgccaacaaggtaggagct

SEQ ID NO: 713 - RNA, 20 nt, synthetic construct
  source 1..20: mol_type = other RNA
cctccaccaatcgccagaca

SEQ ID NO: 714 - RNA, 20 nt, synthetic construct
  source 1..20: mol_type = other RNA
ccaatcctcgagaagattga

SEQ ID NO: 715 - RNA, 20 nt, synthetic construct
  source 1..20: mol_type = other RNA
tccccaatcctcgagaagat

SEQ ID NO: 716 - RNA, 20 nt, synthetic construct
  source 1..20: mol_type = other RNA
agggtccccaatcctcgaga

SEQ ID NO: 717 - RNA, 20 nt, synthetic construct
  source 1..20: mol_type = other RNA
cttctctcaattttctaggg

SEQ ID NO: 718 - RNA, 20 nt, synthetic construct
  source 1..20: mol_type = other RNA
gataaccaggacaagttgga

SEQ ID NO: 719 - RNA, 20 nt, synthetic construct
  source 1..20: mol_type = other RNA
tcaagcctccaagctgtgcc

SEQ ID NO: 720 - RNA, 20 nt, synthetic construct
  source 1..20: mol_type = other RNA
ccaccagcacgggaccatgc

SEQ ID NO: 721 - RNA, 20 nt, synthetic construct
  source 1..20: mol_type = other RNA
ctccatgcgacgtgcagagg

SEQ ID NO: 722 - RNA, 20 nt, synthetic construct
  source 1..20: mol_type = other RNA
gtggtctccatgcgacgtgc

SEQ ID NO: 723 - RNA, 20 nt, synthetic construct
  source 1..20: mol_type = other RNA
tatggatgatgtggtattgg

SEQ ID NO: 724 - DNA, 20 bp, synthetic construct
  source 1..20: mol_type = other DNA
tttttgataatgtcttggtg

SEQ ID NO: 725 - DNA, 20 bp, synthetic construct
  source 1..20: mol_type = other DNA
ttttgtatgatgtgttcttg

SEQ ID NO: 726 - DNA, 20 bp, synthetic construct
  source 1..20: mol_type = other DNA
ttttggaagagaaaccgtta

SEQ ID NO: 727 - DNA, 20 bp, synthetic construct
  source 1..20: mol_type = other DNA
ttttgctcgcagcaggtctg

SEQ ID NO: 728 - DNA, 20 bp, synthetic construct
  source 1..20: mol_type = other DNA
ttttgataatgtcttggtgt

SEQ ID NO: 729 - DNA, 20 bp, synthetic construct
  source 1..20: mol_type = other DNA
ttttctcattaactgtaagt

SEQ ID NO: 730 - DNA, 21 bp, synthetic construct
  source 1..21: mol_type = other DNA
ttttccgaaagcccaggatga

SEQ ID NO: 731 - DNA, 20 bp, synthetic construct
  source 1..20: mol_type = other DNA
ttttatgggttatgtcattg

SEQ ID NO: 732 - DNA, 21 bp, synthetic construct
  source 1..21: mol_type = other DNA
tttgtttacgtcccgtcggcg

SEQ ID NO: 733 - DNA, 20 bp, synthetic construct
  source 1..20: mol_type = other DNA
tttgtgggtcaccatattct

SEQ ID NO: 734 - DNA, 20 bp, synthetic construct
  source 1..20: mol_type = other DNA
tttgtctttgggtatacatt

SEQ ID NO: 735 - DNA, 20 bp, synthetic construct
  source 1..20: mol_type = other DNA
tttgtatgatgtgttcttgt

SEQ ID NO: 736 - DNA, 20 bp, synthetic construct
  source 1..20: mol_type = other DNA
tttgtagtatgccctgagcc

SEQ ID NO: 737 - DNA, 20 bp, synthetic construct
  source 1..20: mol_type = other DNA
tttgtaggcccacttacagt

SEQ ID NO: 738 - DNA, 20 bp, synthetic construct
  source 1..20: mol_type = other DNA
tttggtgtctttcggagtgt

SEQ ID NO: 739 - DNA, 20 bp, synthetic construct
  source 1..20: mol_type = other DNA
tttggtggtctataagctgg

SEQ ID NO: 740 - DNA, 20 bp, synthetic construct
  source 1..20: mol_type = other DNA
tttggaagtaatgattaact

SEQ ID NO: 741 - DNA, 20 bp, synthetic construct
  source 1..20: mol_type = other DNA
tttggaagatccagcatcta

SEQ ID NO: 742 - DNA, 20 bp, synthetic construct
  source 1..20: mol_type = other DNA
tttggaagagaaaccgttat

SEQ ID NO: 743 - DNA, 20 bp, synthetic construct
  source 1..20: mol_type = other DNA
tttgctgtgtttgctctgaa

SEQ ID NO: 744 - DNA, 21 bp, synthetic construct
  source 1..21: mol_type = other DNA
tttgctgccccatttacacaa

SEQ ID NO: 745 - DNA, 20 bp, synthetic construct
  source 1..20: mol_type = other DNA
tttgctctgaaggctggatc

SEQ ID NO: 746 - DNA, 20 bp, synthetic construct
  source 1..20: mol_type = other DNA
tttgctcgcagcaggtctgg

SEQ ID NO: 747 - DNA, 20 bp, synthetic construct
  source 1..20: mol_type = other DNA
tttgctccagacctgctgcg

SEQ ID NO: 748 - DNA, 21 bp, synthetic construct
  source 1..21: mol_type = other DNA
tttgccttctgacttctttcc

SEQ ID NO: 749 - DNA, 20 bp, synthetic construct
  source 1..20: mol_type = other DNA
tttgagaaacactcatcctc

SEQ ID NO: 750 - DNA, 20 bp, synthetic construct
  source 1..20: mol_type = other DNA
tttgaagtatgcctcaaggt

SEQ ID NO: 751 - DNA, 21 bp, synthetic construct
  source 1..21: mol_type = other DNA
tttcttgttgacaagaatcct

SEQ ID NO: 752 - DNA, 20 bp, synthetic construct
  source 1..20: mol_type = other DNA
tttcttgtctcacttttgga

SEQ ID NO: 753 - DNA, 20 bp, synthetic construct
  source 1..20: mol_type = other DNA
tttctgtgtaaacaatacct

SEQ ID NO: 754 - DNA, 20 bp, synthetic construct
  source 1..20: mol_type = other DNA
tttctcttccaaaagtgaga

SEQ ID NO: 755 - DNA, 20 bp, synthetic construct
  source 1..20: mol_type = other DNA
tttctcctggctcagtttac

SEQ ID NO: 756 - DNA, 20 bp, synthetic construct
  source 1..20: mol_type = other DNA
tttctcattaactgtaagtg

SEQ ID NO: 757 - DNA, 20 bp, synthetic construct
  source 1..20: mol_type = other DNA
tttctcaaaggtggagacag

SEQ ID NO: 758 - DNA, 21 bp, synthetic construct
  source 1..21: mol_type = other DNA
tttccttcagtacgagatctt

SEQ ID NO: 759 - DNA, 20 bp, synthetic construct
  source 1..20: mol_type = other DNA
tttccgaaagcccaggatga

SEQ ID NO: 760 - DNA, 20 bp, synthetic construct
  source 1..20: mol_type = other DNA
tttccaatgaggattaaaga

SEQ ID NO: 761 - DNA, 20 bp, synthetic construct
  source 1..20: mol_type = other DNA
tttccaatcaataggcctgt

SEQ ID NO: 762 - DNA, 20 bp, synthetic construct
  source 1..20: mol_type = other DNA
tttcagttatatggatgatg

SEQ ID NO: 763 - DNA, 20 bp, synthetic construct
  source 1..20: mol_type = other DNA
tttatgggttatgtcattgg

SEQ ID NO: 764 - DNA, 20 bp, synthetic construct
  source 1..20: mol_type = other DNA
tttataagggtcgatgtcca

SEQ ID NO: 765 - DNA, 20 bp, synthetic construct
  source 1..20: mol_type = other DNA
tttagaaaacttcctattaa

SEQ ID NO: 766 - DNA, 20 bp, synthetic construct
  source 1..20: mol_type = other DNA
tttaccccgttgcccggcaa

SEQ ID NO: 767 - DNA, 20 bp, synthetic construct
  source 1..20: mol_type = other DNA
tttacacagaaaggccttgt

SEQ ID NO: 768 - DNA, 20 bp, synthetic construct
  source 1..20: mol_type = other DNA
tttacacactctatggaagg

SEQ ID NO: 769 - DNA, 20 bp, synthetic construct
  source 1..20: mol_type = other DNA
tttacacaatgtggttatcc

SEQ ID NO: 770 - DNA, 20 bp, synthetic construct
  source 1..20: mol_type = other DNA
tttaatctaatctcctcccc

SEQ ID NO: 771 - DNA, 20 bp, synthetic construct
  source 1..20: mol_type = other DNA
tttaaatgtatacccaaaga

SEQ ID NO: 772 - DNA, 20 bp, synthetic construct
  source 1..20: mol_type = other DNA
tttaaagactgggaggagtt

SEQ ID NO: 773 - DNA, 20 bp, synthetic construct
  source 1..20: mol_type = other DNA
tttaaaccctaacaaaacaa

SEQ ID NO: 774 - DNA, 21 bp, synthetic construct
  source 1..21: mol_type = other DNA
ttgtttacacagaaaggcctt

SEQ ID NO: 775 - DNA, 21 bp, synthetic construct
  source 1..21: mol_type = other DNA
ttgttggttcttctggactat

SEQ ID NO: 776 - DNA, 20 bp, synthetic construct
  source 1..20: mol_type = other DNA
ttgttcatgtcctactgttc

SEQ ID NO: 777 - DNA, 20 bp, synthetic construct
  source 1..20: mol_type = other DNA
ttgtgggtcaccatattctt

SEQ ID NO: 778 - DNA, 21 bp, synthetic construct
  source 1..21: mol_type = other DNA
ttgtggcaaggacccataact

SEQ ID NO: 779 - DNA, 20 bp, synthetic construct
  source 1..20: mol_type = other DNA
ttgtgaggattcttgtcaac

SEQ ID NO: 780 - DNA, 20 bp, synthetic construct
  source 1..20: mol_type = other DNA
ttgtctttgggtatacattt

SEQ ID NO: 781 - DNA, 20 bp, synthetic construct
  source 1..20: mol_type = other DNA
ttgtctcacttttggaagag

SEQ ID NO: 782 - DNA, 20 bp, synthetic construct
  source 1..20: mol_type = other DNA
ttgtatgcatgtattcaatc

SEQ ID NO: 783 - DNA, 20 bp, synthetic construct
  source 1..20: mol_type = other DNA
ttgtagtatgccctgagcct

SEQ ID NO: 784 - DNA, 21 bp, synthetic construct
  source 1..21: mol_type = other DNA
ttgtactaggaggctgtaggc

SEQ ID NO: 785 - DNA, 20 bp, synthetic construct
  source 1..20: mol_type = other DNA
ttgtaagttggcgagaaagt

SEQ ID NO: 786 - DNA, 20 bp, synthetic construct
  source 1..20: mol_type = other DNA
ttggttcttctggactatca

SEQ ID NO: 787 - DNA, 20 bp, synthetic construct
  source 1..20: mol_type = other DNA
ttggtgtaaatgtatattag

SEQ ID NO: 788 - DNA, 20 bp, synthetic construct
  source 1..20: mol_type = other DNA
ttggtggtctataagctgga

SEQ ID NO: 789 - DNA, 20 bp, synthetic construct
  source 1..20: mol_type = other DNA
ttggtgagtgattggaggtt

SEQ ID NO: 790 - DNA, 20 bp, synthetic construct
  source 1..20: mol_type = other DNA
ttggtaacagcggtaaaaag

SEQ ID NO: 791 - DNA, 20 bp, synthetic construct
  source 1..20: mol_type = other DNA
ttgggtatacatttaaaccc

SEQ ID NO: 792 - DNA, 20 bp, synthetic construct
  source 1..20: mol_type = other DNA
ttgggggaggagattagatt

SEQ ID NO: 793 - DNA, 20 bp, synthetic construct
  source 1..20: mol_type = other DNA
ttgggattgaagtcccaatc

SEQ ID NO: 794 - DNA, 20 bp, synthetic construct
  source 1..20: mol_type = other DNA
ttgggacttcaatcccaaca

SEQ ID NO: 795 - DNA, 20 bp, synthetic construct
  source 1..20: mol_type = other DNA
ttggctttcagttatatgga

SEQ ID NO: 796 - DNA, 20 bp, synthetic construct
  source 1..20: mol_type = other DNA
ttggcgagaaagtgaaagcc

SEQ ID NO: 797 - DNA, 20 bp, synthetic construct
  source 1..20: mol_type = other DNA
ttggatccagccttcagagc

SEQ ID NO: 798 - DNA, 21 bp, synthetic construct
  source 1..21: mol_type = other DNA
ttggaggacaggaggttggtg

SEQ ID NO: 799 - DNA, 20 bp, synthetic construct
  source 1..20: mol_type = other DNA
ttggaggacaggaggttggt

SEQ ID NO: 800 - DNA, 20 bp, synthetic construct
  source 1..20: mol_type = other DNA
ttggaagatccagcatctag

SEQ ID NO: 801 - DNA, 20 bp, synthetic construct
  source 1..20: mol_type = other DNA
ttggaagagaaaccgttata

SEQ ID NO: 802 - DNA, 20 bp, synthetic construct
  source 1..20: mol_type = other DNA
ttgcttgcctgagtgcagta

SEQ ID NO: 803 - DNA, 21 bp, synthetic construct
  source 1..21: mol_type = other DNA
ttgctgtgtttgctctgaagg

SEQ ID NO: 804 - DNA, 20 bp, synthetic construct
  source 1..20: mol_type = other DNA
ttgctgacgcaacccccact

SEQ ID NO: 805 - DNA, 21 bp, synthetic construct
  source 1..21: mol_type = other DNA
ttgctctgaaggctggatcca

SEQ ID NO: 806 - DNA, 20 bp, synthetic construct
  source 1..20: mol_type = other DNA
ttgcctgagtgcagtatggt

SEQ ID NO: 807 - DNA, 21 bp, synthetic construct
  source 1..21: mol_type = other DNA
ttgcctgaactttaggcccat

SEQ ID NO: 808 - DNA, 20 bp, synthetic construct
  source 1..20: mol_type = other DNA
ttgcccaaggtcttacataa

SEQ ID NO: 809 - DNA, 20 bp, synthetic construct
  source 1..20: mol_type = other DNA
ttgccagcaaatccgcctcc

SEQ ID NO: 810 - DNA, 21 bp, synthetic construct
  source 1..21: mol_type = other DNA
ttgcatggtgctggtgcgcag

SEQ ID NO: 811 - DNA, 20 bp, synthetic construct
  source 1..20: mol_type = other DNA
ttgcaattgattatgcctgc

SEQ ID NO: 812 - DNA, 20 bp, synthetic construct
  source 1..20: mol_type = other DNA
ttgcaatcttcttttctcat

SEQ ID NO: 813 - DNA, 20 bp, synthetic construct
  source 1..20: mol_type = other DNA
ttgattggaaagtatgtcaa

SEQ ID NO: 814 - DNA, 20 bp, synthetic construct
  source 1..20: mol_type = other DNA
ttgaggatcctggaattaga

SEQ ID NO: 815 - DNA, 20 bp, synthetic construct
  source 1..20: mol_type = other DNA
ttgagaaacactcatcctca

SEQ ID NO: 816 - DNA, 20 bp, synthetic construct
  source 1..20: mol_type = other DNA
ttgacattgcagagagtcca

SEQ ID NO: 817 - DNA, 20 bp, synthetic construct
  source 1..20: mol_type = other DNA
ttgacatactttccaatcaa

SEQ ID NO: 818 - DNA, 20 bp, synthetic construct
  source 1..20: mol_type = other DNA
ttgaagtcccaatctggatt

SEQ ID NO: 819 - DNA, 21 bp, synthetic construct
  source 1..21: mol_type = other DNA
ttgaacagtaggacatgaaca

SEQ ID NO: 820 - DNA, 20 bp, synthetic construct
  source 1..20: mol_type = other DNA
ttgaacagtaggacatgaac

SEQ ID NO: 821 - DNA, 20 bp, synthetic construct
  source 1..20: mol_type = other DNA
ttctttcccgaccaccagtt

SEQ ID NO: 822 - DNA, 20 bp, synthetic construct
  source 1..20: mol_type = other DNA
ttcttgtctcacttttggaa

SEQ ID NO: 823 - DNA, 20 bp, synthetic construct
  source 1..20: mol_type = other DNA
ttcttgggaacaagatctac

SEQ ID NO: 824 - DNA, 21 bp, synthetic construct
  source 1..21: mol_type = other DNA
ttctcttccaaaagtgagaca

SEQ ID NO: 825 - DNA, 20 bp, synthetic construct
  source 1..20: mol_type = other DNA
ttctcttccaaaagtgagac

SEQ ID NO: 826 - DNA, 20 bp, synthetic construct
  source 1..20: mol_type = other DNA
ttctctcaattttctagggg

SEQ ID NO: 827 - DNA, 20 bp, synthetic construct
  source 1..20: mol_type = other DNA
ttctcgaggattggggaccc

SEQ ID NO: 828 - DNA, 20 bp, synthetic construct
  source 1..20: mol_type = other DNA
ttctcatctgccggaccgtg

SEQ ID NO: 829 - DNA, 20 bp, synthetic construct
  source 1..20: mol_type = other DNA
ttctcaaaggtggagacagc

SEQ ID NO: 830 - DNA, 20 bp, synthetic construct
  source 1..20: mol_type = other DNA
ttcgcttcacctctgcacgt

SEQ ID NO: 831 - DNA, 20 bp, synthetic construct
  source 1..20: mol_type = other DNA
ttcgcactcctccagcttat

SEQ ID NO: 832 - DNA, 20 bp, synthetic construct
  source 1..20: mol_type = other DNA
ttccttggactcataaggtg

SEQ ID NO: 833 - DNA, 20 bp, synthetic construct
  source 1..20: mol_type = other DNA
ttccttgagcagtagtcatg

SEQ ID NO: 834 - DNA, 20 bp, synthetic construct
  source 1..20: mol_type = other DNA
ttcctgtctggcgattggtg

SEQ ID NO: 835 - DNA, 20 bp, synthetic construct
  source 1..20: mol_type = other DNA
ttcctatgggagtgggcctc

SEQ ID NO: 836 - DNA, 20 bp, synthetic construct
  source 1..20: mol_type = other DNA
ttcctaatatacatttacac

SEQ ID NO: 837 - DNA, 20 bp, synthetic construct
  source 1..20: mol_type = other DNA
ttccgtccgaaggtttggta

SEQ ID NO: 838 - DNA, 20 bp, synthetic construct
  source 1..20: mol_type = other DNA
ttccggaagtgttgatagga

SEQ ID NO: 839 - DNA, 20 bp, synthetic construct
  source 1..20: mol_type = other DNA
ttccggaaactactgttgtt

SEQ ID NO: 840 - DNA, 20 bp, synthetic construct
  source 1..20: mol_type = other DNA
ttccgcagtatggatcggca

SEQ ID NO: 841 - DNA, 20 bp, synthetic construct
  source 1..20: mol_type = other DNA
ttccgaaagcccaggatgat

SEQ ID NO: 842 - DNA, 20 bp, synthetic construct
  source 1..20: mol_type = other DNA
ttcccgatacagagctgagg

SEQ ID NO: 843 - DNA, 20 bp, synthetic construct
  source 1..20: mol_type = other DNA
ttcccgagattgagatcttc

SEQ ID NO: 844 - DNA, 20 bp, synthetic construct
  source 1..20: mol_type = other DNA
ttccccctagaaaattgaga

SEQ ID NO: 845 - DNA, 20 bp, synthetic construct
  source 1..20: mol_type = other DNA
ttcccccactgtttggcttt

SEQ ID NO: 846 - DNA, 20 bp, synthetic construct
  source 1..20: mol_type = other DNA
ttccccaccttatgagtcca

SEQ ID NO: 847 - DNA, 20 bp, synthetic construct
  source 1..20: mol_type = other DNA
ttccaggatcctcaaccacc

SEQ ID NO: 848 - DNA, 20 bp, synthetic construct
  source 1..20: mol_type = other DNA
ttccaatgacataacccata

SEQ ID NO: 849 - DNA, 20 bp, synthetic construct
  source 1..20: mol_type = other DNA
ttccaaattaacacccaccc

SEQ ID NO: 850 - DNA, 20 bp, synthetic construct
  source 1..20: mol_type = other DNA
ttcaggtattgtttacacag

SEQ ID NO: 851 - DNA, 20 bp, synthetic construct
  source 1..20: mol_type = other DNA
ttcactttctcgccaactta

SEQ ID NO: 852 - DNA, 20 bp, synthetic construct
  source 1..20: mol_type = other DNA
ttcacctctgcacgtcgcat

SEQ ID NO: 853 - DNA, 20 bp, synthetic construct
  source 1..20: mol_type = other DNA
ttcaaagactgtttgtttaa

SEQ ID NO: 854 - DNA, 20 bp, synthetic construct
  source 1..20: mol_type = other DNA
ttatcgctggatgtgtctgc

SEQ ID NO: 855 - DNA, 20 bp, synthetic construct
  source 1..20: mol_type = other DNA
ttatcagtcccgataatgtt

SEQ ID NO: 856 - DNA, 20 bp, synthetic construct
  source 1..20: mol_type = other DNA
ttatatggatgatgtggtat

SEQ ID NO: 857 - DNA, 20 bp, synthetic construct
  source 1..20: mol_type = other DNA
ttagtattccttggactcat

SEQ ID NO: 858 - DNA, 20 bp, synthetic construct
  source 1..20: mol_type = other DNA
ttagggtttaaatgtatacc

SEQ ID NO: 859 - DNA, 20 bp, synthetic construct
  source 1..20: mol_type = other DNA
ttaggcagaggtgaaaaagt

SEQ ID NO: 860 - DNA, 20 bp, synthetic construct
  source 1..20: mol_type = other DNA
ttagattgaatacatgcata

SEQ ID NO: 861 - DNA, 20 bp, synthetic construct
  source 1..20: mol_type = other DNA
ttagattaaaggtctttgta

SEQ ID NO: 862 - DNA, 20 bp, synthetic construct
  source 1..20: mol_type = other DNA
ttagaaaacttcctattaac

SEQ ID NO: 863 - DNA, 20 bp, synthetic construct
  source 1..20: mol_type = other DNA
ttactgctcctgaactggag

SEQ ID NO: 864 - DNA, 20 bp, synthetic construct
  source 1..20: mol_type = other DNA
ttactctcgtttttgccttc

SEQ ID NO: 865 - DNA, 20 bp, synthetic construct
  source 1..20: mol_type = other DNA
ttacgcggactccccgtctg

SEQ ID NO: 866 - DNA, 20 bp, synthetic construct
  source 1..20: mol_type = other DNA
ttaccccgttgcccggcaac

SEQ ID NO: 867 - DNA, 20 bp, synthetic construct
  source 1..20: mol_type = other DNA
ttaccattggataagggtat

SEQ ID NO: 868 - DNA, 20 bp, synthetic construct
  source 1..20: mol_type = other DNA
ttacagttaatgagaaaaga

SEQ ID NO: 869 - DNA, 20 bp, synthetic construct
  source 1..20: mol_type = other DNA
ttacaccaagacattatcaa

SEQ ID NO: 870 - DNA, 20 bp, synthetic construct
  source 1..20: mol_type = other DNA
ttacacactctatggaaggc

SEQ ID NO: 871 - DNA, 20 bp, synthetic construct
  source 1..20: mol_type = other DNA
ttaatgagaaaagaagattg

SEQ ID NO: 872 - DNA, 20 bp, synthetic construct
  source 1..20: mol_type = other DNA
ttaatcattacttccaaact

SEQ ID NO: 873 - DNA, 20 bp, synthetic construct
  source 1..20: mol_type = other DNA
ttaatacccttatccaatgg

SEQ ID NO: 874 - DNA, 20 bp, synthetic construct
  source 1..20: mol_type = other DNA
ttaactgtaagtgggcctac

SEQ ID NO: 875 - DNA, 21 bp, synthetic construct
  source 1..21: mol_type = other DNA
ttaactagatgttctggataa

SEQ ID NO: 876 - DNA, 20 bp, synthetic construct
  source 1..20: mol_type = other DNA
ttaacaggcctattgattgg

SEQ ID NO: 877 - DNA, 20 bp, synthetic construct
  source 1..20: mol_type = other DNA
ttaacacccacccaggtagc

SEQ ID NO: 878 - DNA, 20 bp, synthetic construct
  source 1..20: mol_type = other DNA
ttaaatgtatacccaaagac

SEQ ID NO: 879 - DNA, 20 bp, synthetic construct
  source 1..20: mol_type = other DNA
ttaaaggtctttgtactagg

SEQ ID NO: 880 - DNA, 20 bp, synthetic construct
  source 1..20: mol_type = other DNA
ttaaagactgggaggagttg

SEQ ID NO: 881 - DNA, 20 bp, synthetic construct
  source 1..20: mol_type = other DNA
ttaaagacaggtacagtaga

SEQ ID NO: 882 - DNA, 20 bp, synthetic construct
  source 1..20: mol_type = other DNA
ttaaaccctaacaaaacaaa

SEQ ID NO: 883 - DNA, 20 bp, synthetic construct
  source 1..20: mol_type = other DNA
tgttttgctcgcagcaggtc

SEQ ID NO: 884 - DNA, 20 bp, synthetic construct
  source 1..20: mol_type = other DNA
tgttttagaaaacttcctat

SEQ ID NO: 885 - DNA, 20 bp, synthetic construct
  source 1..20: mol_type = other DNA
tgtttgtttaaagactggga

SEQ ID NO: 886 - DNA, 21 bp, synthetic construct
  source 1..21: mol_type = other DNA
tgtttggctttcagttatatg

SEQ ID NO: 887 - DNA, 20 bp, synthetic construct
  source 1..20: mol_type = other DNA
tgtttggctttcagttatat

SEQ ID NO: 888 - DNA, 20 bp, synthetic construct
  source 1..20: mol_type = other DNA
tgtttgctccagacctgctg

SEQ ID NO: 889 - DNA, 20 bp, synthetic construct
  source 1..20: mol_type = other DNA
tgtttctcaaaggtggagac

SEQ ID NO: 890 - DNA, 20 bp, synthetic construct
  source 1..20: mol_type = other DNA
tgtttacgtcccgtcggcgc

SEQ ID NO: 891 - DNA, 20 bp, synthetic construct
  source 1..20: mol_type = other DNA
tgttggttcttctggactat

SEQ ID NO: 892 - DNA, 21 bp, synthetic construct
  source 1..21: mol_type = other DNA
tgttgggattgaagtcccaat

SEQ ID NO: 893 - DNA, 20 bp, synthetic construct
  source 1..20: mol_type = other DNA
tgttgctgtaccaaaccttc

SEQ ID NO: 894 - DNA, 20 bp, synthetic construct
  source 1..20: mol_type = other DNA
tgttgcccaaggtcttacat

SEQ ID NO: 895 - DNA, 20 bp, synthetic construct
  source 1..20: mol_type = other DNA
tgttgacataactgactact

SEQ ID NO: 896 - DNA, 20 bp, synthetic construct
  source 1..20: mol_type = other DNA
tgttctccatgttcagcgca

SEQ ID NO: 897 - DNA, 20 bp, synthetic construct
  source 1..20: mol_type = other DNA
tgttcatgtcctactgttca

SEQ ID NO: 898 - DNA, 21 bp, synthetic construct
  source 1..21: mol_type = other DNA
tgttagtattccttggactca

SEQ ID NO: 899 - DNA, 20 bp, synthetic construct
  source 1..20: mol_type = other DNA
tgttaataggaagttttcta

SEQ ID NO: 900 - DNA, 20 bp, synthetic construct
  source 1..20: mol_type = other DNA
tgtgttgtttctctcttata

SEQ ID NO: 901 - DNA, 20 bp, synthetic construct
  source 1..20: mol_type = other DNA
tgtgtcttggccaaaattcg

SEQ ID NO: 902 - DNA, 21 bp, synthetic construct
  source 1..21: mol_type = other DNA
tgtgtaaatagtgtctagttt

SEQ ID NO: 903 - DNA, 20 bp, synthetic construct
  source 1..20: mol_type = other DNA
tgtgtaaatagtgtctagtt

SEQ ID NO: 904 - DNA, 20 bp, synthetic construct
  source 1..20: mol_type = other DNA
tgtgggtcaccatattcttg

SEQ ID NO: 905 - DNA, 20 bp, synthetic construct
  source 1..20: mol_type = other DNA
tgtggagttactctcgtttt

SEQ ID NO: 906 - DNA, 20 bp, synthetic construct
  source 1..20: mol_type = other DNA
tgtgccttgggtggctttgg

SEQ ID NO: 907 - DNA, 20 bp, synthetic construct
  source 1..20: mol_type = other DNA
tgtgcacttcgcttcacctc

SEQ ID NO: 908 - DNA, 20 bp, synthetic construct
  source 1..20: mol_type = other DNA
tgtgaggattcttgtcaaca

SEQ ID NO: 909 - DNA, 20 bp, synthetic construct
  source 1..20: mol_type = other DNA
tgtctttcggagtgtggatt

SEQ ID NO: 910 - DNA, 20 bp, synthetic construct
  source 1..20: mol_type = other DNA
tgtctttaatcctcattgga

SEQ ID NO: 911 - DNA, 20 bp, synthetic construct
  source 1..20: mol_type = other DNA
tgtcttggtgtaaatgtata

SEQ ID NO: 912 - DNA, 20 bp, synthetic construct
  source 1..20: mol_type = other DNA
tgtctggcgattggtggagg

SEQ ID NO: 913 - DNA, 21 bp, synthetic construct
  source 1..21: mol_type = other DNA
tgtccttgttgggattgaagt

SEQ ID NO: 914 - DNA, 20 bp, synthetic construct
  source 1..20: mol_type = other DNA
tgtcctactgttcaagcctc

SEQ ID NO: 915 - DNA, 20 bp, synthetic construct
  source 1..20: mol_type = other DNA
tgtcaacactaatatgggcc

SEQ ID NO: 916 - DNA, 20 bp, synthetic construct
  source 1..20: mol_type = other DNA
tgtatgcatgtattcaatct

SEQ ID NO: 917 - DNA, 20 bp, synthetic construct
  source 1..20: mol_type = other DNA
tgtatgatgtgttcttgtgg

SEQ ID NO: 918 - DNA, 20 bp, synthetic construct
  source 1..20: mol_type = other DNA
tgtatatttgcgggagagga

SEQ ID NO: 919 - DNA, 20 bp, synthetic construct
  source 1..20: mol_type = other DNA
tgtatacccaaagacaaaag

SEQ ID NO: 920 - DNA, 20 bp, synthetic construct
  source 1..20: mol_type = other DNA
tgtagtatgccctgagcctg

SEQ ID NO: 921 - DNA, 20 bp, synthetic construct
  source 1..20: mol_type = other DNA
tgtaggcataaattggtctg

SEQ ID NO: 922 - DNA, 21 bp, synthetic construct
  source 1..21: mol_type = other DNA
tgtagatcttgttcccaagaa

SEQ ID NO: 923 - DNA, 20 bp, synthetic construct
  source 1..20: mol_type = other DNA
tgtaccaaaccttcggacgg

SEQ ID NO: 924 - DNA, 20 bp, synthetic construct
  source 1..20: mol_type = other DNA
tgtaagttggcgagaaagtg

SEQ ID NO: 925 - DNA, 21 bp, synthetic construct
  source 1..21: mol_type = other DNA
tgtaacacgagaaggggtcct

SEQ ID NO: 926 - DNA, 20 bp, synthetic construct
  source 1..20: mol_type = other DNA
tgtaacacgagaaggggtcc

SEQ ID NO: 927 - DNA, 21 bp, synthetic construct
  source 1..21: mol_type = other DNA
tgtaaatgtatattaggaaaa

SEQ ID NO: 928 - DNA, 20 bp, synthetic construct
  source 1..20: mol_type = other DNA
tgtaaatgtatattaggaaa

SEQ ID NO: 929 - DNA, 20 bp, synthetic construct
  source 1..20: mol_type = other DNA
tgtaaatagtgtctagtttg

SEQ ID NO: 930 - DNA, 20 bp, synthetic construct
  source 1..20: mol_type = other DNA
tggttgaggatcctggaatt

SEQ ID NO: 931 - DNA, 20 bp, synthetic construct
  source 1..20: mol_type = other DNA
tggttatcgctggatgtgtc

SEQ ID NO: 932 - DNA, 20 bp, synthetic construct
  source 1..20: mol_type = other DNA
tggtgttttccaatgaggat

SEQ ID NO: 933 - DNA, 21 bp, synthetic construct
  source 1..21: mol_type = other DNA
tggtgtaaatgtatattagga

SEQ ID NO: 934 - DNA, 20 bp, synthetic construct
  source 1..20: mol_type = other DNA
tggtgtaaatgtatattagg

SEQ ID NO: 935 - DNA, 20 bp, synthetic construct
  source 1..20: mol_type = other DNA
tggtggtctataagctggag

SEQ ID NO: 936 - DNA, 20 bp, synthetic construct
  source 1..20: mol_type = other DNA
tggtggtcgggaaagaatcc

SEQ ID NO: 937 - DNA, 20 bp, synthetic construct
  source 1..20: mol_type = other DNA
tggtggctccagttcaggag

SEQ ID NO: 938 - DNA, 20 bp, synthetic construct
  source 1..20: mol_type = other DNA
tggtgagtgattggaggttg

SEQ ID NO: 939 - DNA, 20 bp, synthetic construct
  source 1..20: mol_type = other DNA
tggtgaggtgaacaatgctc

SEQ ID NO: 940 - DNA, 20 bp, synthetic construct
  source 1..20: mol_type = other DNA
tggtgacccacaaaatgagg

SEQ ID NO: 941 - DNA, 20 bp, synthetic construct
  source 1..20: mol_type = other DNA
tggtctgcgcaccagcacca

SEQ ID NO: 942 - DNA, 20 bp, synthetic construct
  source 1..20: mol_type = other DNA
tggtctccatgcgacgtgca

SEQ ID NO: 943 - DNA, 21 bp, synthetic construct
  source 1..21: mol_type = other DNA
tggtctataagctggaggagt

SEQ ID NO: 944 - DNA, 20 bp, synthetic construct
  source 1..20: mol_type = other DNA
tggtctataagctggaggag

SEQ ID NO: 945 - DNA, 20 bp, synthetic construct
  source 1..20: mol_type = other DNA
tggtcggtcggaacggcaga

SEQ ID NO: 946 - DNA, 20 bp, synthetic construct
  source 1..20: mol_type = other DNA
tggtcgggaaagaatcccag

SEQ ID NO: 947 - DNA, 20 bp, synthetic construct
  source 1..20: mol_type = other DNA
tggtcccgtgctggtggttg

SEQ ID NO: 948 - DNA, 21 bp, synthetic construct
  source 1..21: mol_type = other DNA
tgggttttgctgccccattta

SEQ ID NO: 949 - DNA, 20 bp, synthetic construct
  source 1..20: mol_type = other DNA
tgggtttcaccccaccgcac

SEQ ID NO: 950 - DNA, 21 bp, synthetic construct
  source 1..21: mol_type = other DNA
tgggttatgtcattggaagtt

SEQ ID NO: 951 - DNA, 20 bp, synthetic construct
  source 1..20: mol_type = other DNA
tgggtgggtgttaatttgga

SEQ ID NO: 952 - DNA, 21 bp, synthetic construct
  source 1..21: mol_type = other DNA
tggggttactctctgaatttt

SEQ ID NO: 953 - DNA, 20 bp, synthetic construct
  source 1..20: mol_type = other DNA
tggggtggagccctcaggct

SEQ ID NO: 954 - DNA, 20 bp, synthetic construct
  source 1..20: mol_type = other DNA
tggggggaactaatgactct

SEQ ID NO: 955 - DNA, 20 bp, synthetic construct
  source 1..20: mol_type = other DNA
tgggggaggagattagatta

SEQ ID NO: 956 - DNA, 20 bp, synthetic construct
  source 1..20: mol_type = other DNA
tggggcagaatctttccacc

SEQ ID NO: 957 - DNA, 20 bp, synthetic construct
  source 1..20: mol_type = other DNA
tggggactgcgaattttggc

SEQ ID NO: 958 - DNA, 20 bp, synthetic construct
  source 1..20: mol_type = other DNA
tggggaccctgcgctgaaca

SEQ ID NO: 959 - DNA, 20 bp, synthetic construct
  source 1..20: mol_type = other DNA
tgggccatcagcgcgtgcgt

SEQ ID NO: 960 - DNA, 20 bp, synthetic construct
  source 1..20: mol_type = other DNA
tgggattgaagtcccaatct

SEQ ID NO: 961 - DNA, 20 bp, synthetic construct
  source 1..20: mol_type = other DNA
tgggattctttcccgaccac

SEQ ID NO: 962 - DNA, 20 bp, synthetic construct
  source 1..20: mol_type = other DNA
tgggatcttgcagagtttgg

SEQ ID NO: 963 - DNA, 20 bp, synthetic construct
  source 1..20: mol_type = other DNA
tgggacttcaatcccaacaa

SEQ ID NO: 964 - DNA, 20 bp, synthetic construct
  source 1..20: mol_type = other DNA
tggctttggggcatggacat

SEQ ID NO: 965 - DNA, 20 bp, synthetic construct
  source 1..20: mol_type = other DNA
tggctgctaggctgtgctgc

SEQ ID NO: 966 - DNA, 20 bp, synthetic construct
  source 1..20: mol_type = other DNA
tggctccagttcaggagcag

SEQ ID NO: 967 - DNA, 20 bp, synthetic construct
  source 1..20: mol_type = other DNA
tggcgattggtggaggcagg

SEQ ID NO: 968 - DNA, 20 bp, synthetic construct
  source 1..20: mol_type = other DNA
tggccagacgccaacaaggt

SEQ ID NO: 969 - DNA, 20 bp, synthetic construct
  source 1..20: mol_type = other DNA
tggccaaaattcgcagtccc

SEQ ID NO: 970 - DNA, 21 bp, synthetic construct
  source 1..21: mol_type = other DNA
tggcagcacagcctagcagcc

SEQ ID NO: 971 - DNA, 20 bp, synthetic construct
  source 1..20: mol_type = other DNA
tggcactagtaaactgagcc

SEQ ID NO: 972 - DNA, 20 bp, synthetic construct
  source 1..20: mol_type = other DNA
tggcaaggacccataacttc

SEQ ID NO: 973 - DNA, 20 bp, synthetic construct
  source 1..20: mol_type = other DNA
tggatttgctgtgtttgctc

SEQ ID NO: 974 - DNA, 21 bp, synthetic construct
  source 1..21: mol_type = other DNA
tggatgatgtggtattggggg

SEQ ID NO: 975 - DNA, 20 bp, synthetic construct
  source 1..20: mol_type = other DNA
tggatcggcagaggagccga

SEQ ID NO: 976 - DNA, 20 bp, synthetic construct
  source 1..20: mol_type = other DNA
tggatccaactggtggtcgg

SEQ ID NO: 977 - DNA, 20 bp, synthetic construct
  source 1..20: mol_type = other DNA
tggatacgatgtatatttgc

SEQ ID NO: 978 - DNA, 20 bp, synthetic construct
  source 1..20: mol_type = other DNA
tggataaaacctagcaggca

SEQ ID NO: 979 - DNA, 20 bp, synthetic construct
  source 1..20: mol_type = other DNA
tggactctctgcaatgtcaa

SEQ ID NO: 980 - DNA, 20 bp, synthetic construct
  source 1..20: mol_type = other DNA
tggacatcgacccttataaa

SEQ ID NO: 981 - DNA, 20 bp, synthetic construct
  source 1..20: mol_type = other DNA
tggaaggcgggtatattata

SEQ ID NO: 982 - DNA, 21 bp, synthetic construct
  source 1..21: mol_type = other DNA
tggaaccttttcggctcctct

SEQ ID NO: 983 - DNA, 20 bp, synthetic construct
  source 1..20: mol_type = other DNA
tggaaccttttcggctcctc

SEQ ID NO: 984 - DNA, 21 bp, synthetic construct
  source 1..21: mol_type = other DNA
tggaaagtatgtcaacgaatt

SEQ ID NO: 985 - DNA, 20 bp, synthetic construct
  source 1..20: mol_type = other DNA
tggaaaacaccatcttttcc

SEQ ID NO: 986 - DNA, 20 bp, synthetic construct
  source 1..20: mol_type = other DNA
tgctgtagatcttgttccca

SEQ ID NO: 987 - DNA, 20 bp, synthetic construct
  source 1..20: mol_type = other DNA
tgctgtaccaaaccttcgga

SEQ ID NO: 988 - DNA, 20 bp, synthetic construct
  source 1..20: mol_type = other DNA
tgctgtacagacttggcccc

SEQ ID NO: 989 - DNA, 20 bp, synthetic construct
  source 1..20: mol_type = other DNA
tgctggtggttgaggatcct

SEQ ID NO: 990 - DNA, 21 bp, synthetic construct
  source 1..21: mol_type = other DNA
tgctggtggctccagttcagg

SEQ ID NO: 991 - DNA, 20 bp, synthetic construct
  source 1..20: mol_type = other DNA
tgctggtggctccagttcag

SEQ ID NO: 992 - DNA, 20 bp, synthetic construct
  source 1..20: mol_type = other DNA
tgctggcaaagtttgtagta

SEQ ID NO: 993 - DNA, 20 bp, synthetic construct
  source 1..20: mol_type = other DNA
tgctcgcagcaggtctggag

SEQ ID NO: 994 - DNA, 20 bp, synthetic construct
  source 1..20: mol_type = other DNA
tgctcctgaactggagccac

SEQ ID NO: 995 - DNA, 20 bp, synthetic construct
  source 1..20: mol_type = other DNA
tgctccagacctgctgcgag

SEQ ID NO: 996 - DNA, 20 bp, synthetic construct
  source 1..20: mol_type = other DNA
tgctaggttttatccaaagg

SEQ ID NO: 997 - DNA, 20 bp, synthetic construct
  source 1..20: mol_type = other DNA
tgctaggctgtgctgccaac

SEQ ID NO: 998 - DNA, 21 bp, synthetic construct
  source 1..21: mol_type = other DNA
tgcggtggggtgaaacccagc

SEQ ID NO: 999 - DNA, 20 bp, synthetic construct
  source 1..20: mol_type = other DNA
tgcgagcaaaacaagcggct

SEQ ID NO: 1000 - DNA, 20 bp, synthetic construct
  source 1..20: mol_type = other DNA
tgcgacgtgcagaggtgaag

SEQ ID NO: 1001 - DNA, 20 bp, synthetic construct
  source 1..20: mol_type = other DNA
tgcctgctaggttttatcca

SEQ ID NO: 1002 - DNA, 20 bp, synthetic construct
  source 1..20: mol_type = other DNA
tgcctgagtgcagtatggtg

SEQ ID NO: 1003 - DNA, 20 bp, synthetic construct
  source 1..20: mol_type = other DNA
tgcctccaccaatcgccaga

SEQ ID NO: 1004 - DNA, 20 bp, synthetic construct
  source 1..20: mol_type = other DNA
tgcctacagcctcctagtac

SEQ ID NO: 1005 - DNA, 20 bp, synthetic construct
  source 1..20: mol_type = other DNA
tgccgttccgaccgaccacg

SEQ ID NO: 1006 - DNA, 20 bp, synthetic construct
  source 1..20: mol_type = other DNA
tgccgaacctgcatgactac

SEQ ID NO: 1007 - DNA, 20 bp, synthetic construct
  source 1..20: mol_type = other DNA
tgcccttgtatgcatgtatt

SEQ ID NO: 1008 - DNA, 21 bp, synthetic construct
  source 1..21: mol_type = other DNA
tgcccgtttgtcctctaattc

SEQ ID NO: 1009 - DNA, 20 bp, synthetic construct
  source 1..20: mol_type = other DNA
tgcccgtttgtcctctaatt

SEQ ID NO: 1010 - DNA, 20 bp, synthetic construct
  source 1..20: mol_type = other DNA
tgcccaaggtcttacataag

SEQ ID NO: 1011 - DNA, 20 bp, synthetic construct
  source 1..20: mol_type = other DNA
tgccacaagaacacatcata

SEQ ID NO: 1012 - DNA, 20 bp, synthetic construct
  source 1..20: mol_type = other DNA
tgcatgtattcaatctaagc

SEQ ID NO: 1013 - DNA, 20 bp, synthetic construct
  source 1..20: mol_type = other DNA
tgcatacaagggcattaacg

SEQ ID NO: 1014 - DNA, 20 bp, synthetic construct
  source 1..20: mol_type = other DNA
tgcacacggtccggcagatg

SEQ ID NO: 1015 - DNA, 20 bp, synthetic construct
  source 1..20: mol_type = other DNA
tgcaagatcccagagtgaga

SEQ ID NO: 1016 - DNA, 20 bp, synthetic construct
  source 1..20: mol_type = other DNA
tgattggaggttggggactg

SEQ ID NO: 1017 - DNA, 20 bp, synthetic construct
  source 1..20: mol_type = other DNA
tgattggaaagtatgtcaac

SEQ ID NO: 1018 - DNA, 21 bp, synthetic construct
  source 1..21: mol_type = other DNA
tgatgttctccatgttcagcg

SEQ ID NO: 1019 - DNA, 20 bp, synthetic construct
  source 1..20: mol_type = other DNA
tgatgggatgggaatacagg

SEQ ID NO: 1020 - DNA, 20 bp, synthetic construct
  source 1..20: mol_type = other DNA
tgatagtccagaagaaccaa

SEQ ID NO: 1021 - DNA, 20 bp, synthetic construct
  source 1..20: mol_type = other DNA
tgagtgtttctcaaaggtgg

SEQ ID NO: 1022 - DNA, 21 bp, synthetic construct
  source 1..21: mol_type = other DNA
tgagtgcagtatggtgaggtg

SEQ ID NO: 1023 - DNA, 20 bp, synthetic construct
  source 1..20: mol_type = other DNA
tgagtgcagtatggtgaggt

SEQ ID NO: 1024 - DNA, 20 bp, synthetic construct
  source 1..20: mol_type = other DNA
tgagtccctttttaccgctg

SEQ ID NO: 1025 - DNA, 20 bp, synthetic construct
  source 1..20: mol_type = other DNA
tgaggtgaacaatgctcagg

SEQ ID NO: 1026 - DNA, 20 bp, synthetic construct
  source 1..20: mol_type = other DNA
tgaggcatagcagcaggatg

SEQ ID NO: 1027 - DNA, 20 bp, synthetic construct
  source 1..20: mol_type = other DNA
tgaggattcttgtcaacaag

SEQ ID NO: 1028 - DNA, 20 bp, synthetic construct
  source 1..20: mol_type = other DNA
tgaggatgagtgtttctcaa

SEQ ID NO: 1029 - DNA, 20 bp, synthetic construct
  source 1..20: mol_type = other DNA
tgagcctgagggctccaccc

SEQ ID NO: 1030 - DNA, 20 bp, synthetic construct
  source 1..20: mol_type = other DNA
tgagccaggagaaacgggct

SEQ ID NO: 1031 - DNA, 20 bp, synthetic construct
  source 1..20: mol_type = other DNA
tgagatcttctgcgacgcgg

SEQ ID NO: 1032 - DNA, 20 bp, synthetic construct
  source 1..20: mol_type = other DNA
tgagaccttcgtctgcgagg

SEQ ID NO: 1033 - DNA, 20 bp, synthetic construct
  source 1..20: mol_type = other DNA
tgagaaaagaagattgcaat

SEQ ID NO: 1034 - DNA, 20 bp, synthetic construct
  source 1..20: mol_type = other DNA
tgacttctttccttcagtac

SEQ ID NO: 1035 - DNA, 21 bp, synthetic construct
  source 1..21: mol_type = other DNA
tgactactaggtctctagatg

SEQ ID NO: 1036 - DNA, 20 bp, synthetic construct
  source 1..20: mol_type = other DNA
tgacgcaacccccactggct

SEQ ID NO: 1037 - DNA, 20 bp, synthetic construct
  source 1..20: mol_type = other DNA
tgacgataagggagaggcag

SEQ ID NO: 1038 - DNA, 20 bp, synthetic construct
  source 1..20: mol_type = other DNA
tgaccaagccccagccagtg

SEQ ID NO: 1039 - DNA, 20 bp, synthetic construct
  source 1..20: mol_type = other DNA
tgacattgcagagagtccaa

SEQ ID NO: 1040 - DNA, 20 bp, synthetic construct
  source 1..20: mol_type = other DNA
tgacatactttccaatcaat

SEQ ID NO: 1041 - DNA, 21 bp, synthetic construct
  source 1..21: mol_type = other DNA
tgacataacccataaaattca

SEQ ID NO: 1042 - DNA, 20 bp, synthetic construct
  source 1..20: mol_type = other DNA
tgacataacccataaaattc

SEQ ID NO: 1043 - DNA, 20 bp, synthetic construct
  source 1..20: mol_type = other DNA
tgaaggctggatccaactgg

SEQ ID NO: 1044 - DNA, 20 bp, synthetic construct
  source 1..20: mol_type = other DNA
tgaagaggaagatgataaaa

SEQ ID NO: 1045 - DNA, 20 bp, synthetic construct
  source 1..20: mol_type = other DNA
tgaactggagccaccagcag

SEQ ID NO: 1046 - DNA, 20 bp, synthetic construct
  source 1..20: mol_type = other DNA
tgaacctttaccccgttgcc

SEQ ID NO: 1047 - DNA, 21 bp, synthetic construct
  source 1..21: mol_type = other DNA
tgaacatggagaacatcacat

SEQ ID NO: 1048 - DNA, 20 bp, synthetic construct
  source 1..20: mol_type = other DNA
tgaacatggagaacatcaca

SEQ ID NO: 1049 - DNA, 20 bp, synthetic construct
  source 1..20: mol_type = other DNA
tgaacagtaggacatgaaca

SEQ ID NO: 1050 - DNA, 20 bp, synthetic construct
  source 1..20: mol_type = other DNA
tgaacaagagatgattaggc

SEQ ID NO: 1051 - DNA, 20 bp, synthetic construct
  source 1..20: mol_type = other DNA
tgaaagccaaacagtggggg

SEQ ID NO: 1052 - DNA, 20 bp, synthetic construct
  source 1..20: mol_type = other DNA
tgaaaccacaagagttgcct

SEQ ID NO: 1053 - DNA, 20 bp, synthetic construct
  source 1..20: mol_type = other DNA
tcttttcctaatatacattt

SEQ ID NO: 1054 - DNA, 20 bp, synthetic construct
  source 1..20: mol_type = other DNA
tctttgttttgttagggttt

SEQ ID NO: 1055 - DNA, 20 bp, synthetic construct
  source 1..20: mol_type = other DNA
tctttgtactaggaggctgt

SEQ ID NO: 1056 - DNA, 20 bp, synthetic construct
  source 1..20: mol_type = other DNA
tctttgctggggggaactaa

SEQ ID NO: 1057 - DNA, 20 bp, synthetic construct
  source 1..20: mol_type = other DNA
tctttccaccagcaatcctc

SEQ ID NO: 1058 - DNA, 20 bp, synthetic construct
  source 1..20: mol_type = other DNA
tctttaatcctcattggaaa

SEQ ID NO: 1059 - DNA, 20 bp, synthetic construct
  source 1..20: mol_type = other DNA
tctttaaacaaacagtcttt

SEQ ID NO: 1060 - DNA, 20 bp, synthetic construct
  source 1..20: mol_type = other DNA
tcttgttcccaagaatatgg

SEQ ID NO: 1061 - DNA, 20 bp, synthetic construct
  source 1..20: mol_type = other DNA
tcttgtctcacttttggaag

SEQ ID NO: 1062 - DNA, 20 bp, synthetic construct
  source 1..20: mol_type = other DNA
tcttggtgtaaatgtatatt

SEQ ID NO: 1063 - DNA, 20 bp, synthetic construct
  source 1..20: mol_type = other DNA
tcttggactctctgcaatgt

SEQ ID NO: 1064 - DNA, 20 bp, synthetic construct
  source 1..20: mol_type = other DNA
tcttcttttctcattaactg

SEQ ID NO: 1065 - DNA, 20 bp, synthetic construct
  source 1..20: mol_type = other DNA
tcttctgcgacgcggcgatt

SEQ ID NO: 1066 - DNA, 20 bp, synthetic construct
  source 1..20: mol_type = other DNA
tcttctactgtacctgtctt

SEQ ID NO: 1067 - DNA, 20 bp, synthetic construct
  source 1..20: mol_type = other DNA
tcttccaaaagtgagacaag

SEQ ID NO: 1068 - DNA, 20 bp, synthetic construct
  source 1..20: mol_type = other DNA
tcttacataagaggactctt

SEQ ID NO: 1069 - DNA, 20 bp, synthetic construct
  source 1..20: mol_type = other DNA
tctgtgccttctcatctgcc

SEQ ID NO: 1070 - DNA, 20 bp, synthetic construct
  source 1..20: mol_type = other DNA
tctggcgattggtggaggca

SEQ ID NO: 1071 - DNA, 20 bp, synthetic construct
  source 1..20: mol_type = other DNA
tctggccaggtgtccttgtt

SEQ ID NO: 1072 - DNA, 21 bp, synthetic construct
  source 1..21: mol_type = other DNA
tctggagcaaacattatcggg

SEQ ID NO: 1073 - DNA, 20 bp, synthetic construct
  source 1..20: mol_type = other DNA
tctggactatcaaggtatgt

SEQ ID NO: 1074 - DNA, 20 bp, synthetic construct
  source 1..20: mol_type = other DNA
tctgccgttccgaccgacca

SEQ ID NO: 1075 - DNA, 20 bp, synthetic construct
  source 1..20: mol_type = other DNA
tctgcaagatcccagagtga

SEQ ID NO: 1076 - DNA, 21 bp, synthetic construct
  source 1..21: mol_type = other DNA
tctgacttctttccttcagta

SEQ ID NO: 1077 - DNA, 20 bp, synthetic construct
  source 1..20: mol_type = other DNA
tctcttccaaaagtgagaca

SEQ ID NO: 1078 - DNA, 20 bp, synthetic construct
  source 1..20: mol_type = other DNA
tctctcttatataatatacc

SEQ ID NO: 1079 - DNA, 20 bp, synthetic construct
  source 1..20: mol_type = other DNA
tctctagatgctggatcttc

SEQ ID NO: 1080 - DNA, 20 bp, synthetic construct
  source 1..20: mol_type = other DNA
tctcctgagcattgttcacc

SEQ ID NO: 1081 - DNA, 20 bp, synthetic construct
  source 1..20: mol_type = other DNA
tctcctcccccaactcctcc

SEQ ID NO: 1082 - DNA, 20 bp, synthetic construct
  source 1..20: mol_type = other DNA
tctccgtctgccgttccgac

SEQ ID NO: 1083 - DNA, 20 bp, synthetic construct
  source 1..20: mol_type = other DNA
tctcactctgggatcttgca

SEQ ID NO: 1084 - DNA, 20 bp, synthetic construct
  source 1..20: mol_type = other DNA
tctcaatcgccgcgtcgcag

SEQ ID NO: 1085 - DNA, 20 bp, synthetic construct
  source 1..20: mol_type = other DNA
tctcaaaggtggagacagcg

SEQ ID NO: 1086 - DNA, 20 bp, synthetic construct
  source 1..20: mol_type = other DNA
tctataagctggaggagtgc

SEQ ID NO: 1087 - DNA, 20 bp, synthetic construct
  source 1..20: mol_type = other DNA
tctataacggtttctcttcc

SEQ ID NO: 1088 - DNA, 20 bp, synthetic construct
  source 1..20: mol_type = other DNA
tctagtttggaagtaatgat

SEQ ID NO: 1089 - DNA, 20 bp, synthetic construct
  source 1..20: mol_type = other DNA
tctagttaatcattacttcc

SEQ ID NO: 1090 - DNA, 20 bp, synthetic construct
  source 1..20: mol_type = other DNA
tctagactctgcggtattgt

SEQ ID NO: 1091 - DNA, 20 bp, synthetic construct
  source 1..20: mol_type = other DNA
tctagaagatctcgtactga

SEQ ID NO: 1092 - DNA, 20 bp, synthetic construct
  source 1..20: mol_type = other DNA
tctaattccaggatcctcaa

SEQ ID NO: 1093 - DNA, 20 bp, synthetic construct
  source 1..20: mol_type = other DNA
tctaaggcttcccgatacag

SEQ ID NO: 1094 - DNA, 20 bp, synthetic construct
  source 1..20: mol_type = other DNA
tctaacaacagtagtttccg

SEQ ID NO: 1095 - DNA, 20 bp, synthetic construct
  source 1..20: mol_type = other DNA
tcgttgacatactttccaat

SEQ ID NO: 1096 - DNA, 20 bp, synthetic construct
  source 1..20: mol_type = other DNA
tcgtccgcaggattcagcgc

SEQ ID NO: 1097 - DNA, 20 bp, synthetic construct
  source 1..20: mol_type = other DNA
tcgtcaatcttctcgaggat

SEQ ID NO: 1098 - DNA, 20 bp, synthetic construct
  source 1..20: mol_type = other DNA
tcgtactgaaggaaagaagt

SEQ ID NO: 1099 - DNA, 20 bp, synthetic construct
  source 1..20: mol_type = other DNA
tcggtcgttgacattgcaga

SEQ ID NO: 1100 - DNA, 20 bp, synthetic construct
  source 1..20: mol_type = other DNA
tcggtcggaacggcagacgg

SEQ ID NO: 1101 - DNA, 20 bp, synthetic construct
  source 1..20: mol_type = other DNA
tcggcgctgaatcctgcgga

SEQ ID NO: 1102 - DNA, 20 bp, synthetic construct
  source 1..20: mol_type = other DNA
tcggcatggtcccgtgctgg

SEQ ID NO: 1103 - DNA, 20 bp, synthetic construct
  source 1..20: mol_type = other DNA
tcggaacggcagacggagaa

SEQ ID NO: 1104 - DNA, 20 bp, synthetic construct
  source 1..20: mol_type = other DNA
tcggaaaattcctatgggag

SEQ ID NO: 1105 - DNA, 20 bp, synthetic construct
  source 1..20: mol_type = other DNA
tcgcagacgaaggtctcaat

SEQ ID NO: 1106 - DNA, 20 bp, synthetic construct
  source 1..20: mol_type = other DNA
tcgcagaagatctcaatctc

SEQ ID NO: 1107 - DNA, 20 bp, synthetic construct
  source 1..20: mol_type = other DNA
tcgagaagattgacgataag

SEQ ID NO: 1108 - DNA, 20 bp, synthetic construct
  source 1..20: mol_type = other DNA
tcgacccttataaagaattt

SEQ ID NO: 1109 - DNA, 20 bp, synthetic construct
  source 1..20: mol_type = other DNA
tcctttgtttacgtcccgtc

SEQ ID NO: 1110 - DNA, 20 bp, synthetic construct
  source 1..20: mol_type = other DNA
tccttggactcataaggtgg

SEQ ID NO: 1111 - DNA, 20 bp, synthetic construct
  source 1..20: mol_type = other DNA
tccttgagcagtagtcatgc

SEQ ID NO: 1112 - DNA, 20 bp, synthetic construct
  source 1..20: mol_type = other DNA
tccttcagtacgagatcttc

SEQ ID NO: 1113 - DNA, 20 bp, synthetic construct
  source 1..20: mol_type = other DNA
tcctgtctggcgattggtgg

SEQ ID NO: 1114 - DNA, 20 bp, synthetic construct
  source 1..20: mol_type = other DNA
tcctgtcctccaacttgtcc

SEQ ID NO: 1115 - DNA, 20 bp, synthetic construct
  source 1..20: mol_type = other DNA
tcctggaattagaggacaaa

SEQ ID NO: 1116 - DNA, 20 bp, synthetic construct
  source 1..20: mol_type = other DNA
tcctgcggacgacccttctc

SEQ ID NO: 1117 - DNA, 20 bp, synthetic construct
  source 1..20: mol_type = other DNA
tcctgcctccaccaatcgcc

SEQ ID NO: 1118 - DNA, 20 bp, synthetic construct
  source 1..20: mol_type = other DNA
tcctgaactggagccaccag

SEQ ID NO: 1119 - DNA, 20 bp, synthetic construct
  source 1..20: mol_type = other DNA
tcctcttcatcctgctgcta

SEQ ID NO: 1120 - DNA, 20 bp, synthetic construct
  source 1..20: mol_type = other DNA
tcctcttatgtaagaccttg

SEQ ID NO: 1121 - DNA, 20 bp, synthetic construct
  source 1..20: mol_type = other DNA
tcctctaattccaggatcct

SEQ ID NO: 1122 - DNA, 20 bp, synthetic construct
  source 1..20: mol_type = other DNA
tcctcgagaagattgacgat

SEQ ID NO: 1123 - DNA, 20 bp, synthetic construct
  source 1..20: mol_type = other DNA
tcctccagcttatagaccac

SEQ ID NO: 1124 - DNA, 21 bp, synthetic construct
  source 1..21: mol_type = other DNA
tcctagtacaaagacctttaa

SEQ ID NO: 1125 - DNA, 20 bp, synthetic construct
  source 1..20: mol_type = other DNA
tcctagccgcttgttttgct

SEQ ID NO: 1126 - DNA, 20 bp, synthetic construct
  source 1..20: mol_type = other DNA
tcctactgttcaagcctcca

SEQ ID NO: 1127 - DNA, 21 bp, synthetic construct
  source 1..21: mol_type = other DNA
tcctaccttgttggcgtctgg

SEQ ID NO: 1128 - DNA, 20 bp, synthetic construct
  source 1..20: mol_type = other DNA
tcctaatatacatttacacc

SEQ ID NO: 1129 - DNA, 20 bp, synthetic construct
  source 1..20: mol_type = other DNA
tccgtccgaaggtttggtac

SEQ ID NO: 1130 - DNA, 20 bp, synthetic construct
  source 1..20: mol_type = other DNA
tccggcagatgagaaggcac

SEQ ID NO: 1131 - DNA, 20 bp, synthetic construct
  source 1..20: mol_type = other DNA
tccggaagtgttgataggat

SEQ ID NO: 1132 - DNA, 20 bp, synthetic construct
  source 1..20: mol_type = other DNA
tccgcaggattcagcgccga

SEQ ID NO: 1133 - DNA, 20 bp, synthetic construct
  source 1..20: mol_type = other DNA
tccgaaggtttggtacagca

SEQ ID NO: 1134 - DNA, 20 bp, synthetic construct
  source 1..20: mol_type = other DNA
tccgaaagcccaggatgatg

SEQ ID NO: 1135 - DNA, 20 bp, synthetic construct
  source 1..20: mol_type = other DNA
tccctttttaccgctgttac

SEQ ID NO: 1136 - DNA, 21 bp, synthetic construct
  source 1..21: mol_type = other DNA
tcccttatcgtcaatcttctc

SEQ ID NO: 1137 - DNA, 20 bp, synthetic construct
  source 1..20: mol_type = other DNA
tcccttatcgtcaatcttct

SEQ ID NO: 1138 - DNA, 20 bp, synthetic construct
  source 1..20: mol_type = other DNA
tccctgctggtggctccagt

SEQ ID NO: 1139 - DNA, 20 bp, synthetic construct
  source 1..20: mol_type = other DNA
tcccgaccaccagttggatc

SEQ ID NO: 1140 - DNA, 20 bp, synthetic construct
  source 1..20: mol_type = other DNA
tccccctagaaaattgagag

SEQ ID NO: 1141 - DNA, 20 bp, synthetic construct
  source 1..20: mol_type = other DNA
tccccaccttatgagtccaa

SEQ ID NO: 1142 - DNA, 21 bp, synthetic construct
  source 1..21: mol_type = other DNA
tcccatcatcctgggctttcg

SEQ ID NO: 1143 - DNA, 20 bp, synthetic construct
  source 1..20: mol_type = other DNA
tcccatcatcctgggctttc

SEQ ID NO: 1144 - DNA, 20 bp, synthetic construct
  source 1..20: mol_type = other DNA
tcccataggaattttccgaa

SEQ ID NO: 1145 - DNA, 20 bp, synthetic construct
  source 1..20: mol_type = other DNA
tcccagaggattgctggtgg

SEQ ID NO: 1146 - DNA, 20 bp, synthetic construct
  source 1..20: mol_type = other DNA
tcccaacaaggacacctggc

SEQ ID NO: 1147 - DNA, 20 bp, synthetic construct
  source 1..20: mol_type = other DNA
tccatgcgacgtgcagaggt

SEQ ID NO: 1148 - DNA, 20 bp, synthetic construct
  source 1..20: mol_type = other DNA
tccatgccccaaagccaccc

SEQ ID NO: 1149 - DNA, 20 bp, synthetic construct
  source 1..20: mol_type = other DNA
tccagttggcagcacagcct

SEQ ID NO: 1150 - DNA, 20 bp, synthetic construct
  source 1..20: mol_type = other DNA
tccagccttcagagcaaaca

SEQ ID NO: 1151 - DNA, 20 bp, synthetic construct
  source 1..20: mol_type = other DNA
tccagcatctagagacctag

SEQ ID NO: 1152 - DNA, 20 bp, synthetic construct
  source 1..20: mol_type = other DNA
tccaccccaaaaggcctccg

SEQ ID NO: 1153 - DNA, 20 bp, synthetic construct
  source 1..20: mol_type = other DNA
tccaccaatcgccagacagg

SEQ ID NO: 1154 - DNA, 20 bp, synthetic construct
  source 1..20: mol_type = other DNA
tccacactccgaaagacacc

SEQ ID NO: 1155 - DNA, 20 bp, synthetic construct
  source 1..20: mol_type = other DNA
tccaatcaataggcctgtta

SEQ ID NO: 1156 - DNA, 20 bp, synthetic construct
  source 1..20: mol_type = other DNA
tccaagagtcctcttatgta

SEQ ID NO: 1157 - DNA, 21 bp, synthetic construct
  source 1..21: mol_type = other DNA
tccaacttgtcctggttatcg

SEQ ID NO: 1158 - DNA, 20 bp, synthetic construct
  source 1..20: mol_type = other DNA
tccaactggtggtcgggaaa

SEQ ID NO: 1159 - DNA, 20 bp, synthetic construct
  source 1..20: mol_type = other DNA
tccaaattctttataagggt

SEQ ID NO: 1160 - DNA, 20 bp, synthetic construct
  source 1..20: mol_type = other DNA
tcattagttccccccagcaa

SEQ ID NO: 1161 - DNA, 20 bp, synthetic construct
  source 1..20: mol_type = other DNA
tcatccatataactgaaagc

SEQ ID NO: 1162 - DNA, 21 bp, synthetic construct
  source 1..21: mol_type = other DNA
tcagtttactagtgccatttg

SEQ ID NO: 1163 - DNA, 20 bp, synthetic construct
  source 1..20: mol_type = other DNA
tcaggtattgtttacacaga

SEQ ID NO: 1164 - DNA, 20 bp, synthetic construct
  source 1..20: mol_type = other DNA
tcagggcatactacaaactt

SEQ ID NO: 1165 - DNA, 20 bp, synthetic construct
  source 1..20: mol_type = other DNA
tcaggctcagggcatactac

SEQ ID NO: 1166 - DNA, 20 bp, synthetic construct
  source 1..20: mol_type = other DNA
tcagcccgtttctcctggct

SEQ ID NO: 1167 - DNA, 20 bp, synthetic construct
  source 1..20: mol_type = other DNA
tcagaaggcaaaaacgagag

SEQ ID NO: 1168 - DNA, 20 bp, synthetic construct
  source 1..20: mol_type = other DNA
tcactttctcgccaacttac

SEQ ID NO: 1169 - DNA, 21 bp, synthetic construct
  source 1..21: mol_type = other DNA
tcactctgggatcttgcagag

SEQ ID NO: 1170 - DNA, 20 bp, synthetic construct
  source 1..20: mol_type = other DNA
tcacctctgcacgtcgcatg

SEQ ID NO: 1171 - DNA, 20 bp, synthetic construct
  source 1..20: mol_type = other DNA
tcacctcaccatactgcact

SEQ ID NO: 1172 - DNA, 20 bp, synthetic construct
  source 1..20: mol_type = other DNA
tcaccatattcttgggaaca

SEQ ID NO: 1173 - DNA, 21 bp, synthetic construct
  source 1..21: mol_type = other DNA
tcaccatactgcactcaggca

SEQ ID NO: 1174 - DNA, 20 bp, synthetic construct
  source 1..20: mol_type = other DNA
tcaccatactgcactcaggc

SEQ ID NO: 1175 - DNA, 21 bp, synthetic construct
  source 1..21: mol_type = other DNA
tcaccaaactctgcaagatcc

SEQ ID NO: 1176 - DNA, 20 bp, synthetic construct
  source 1..20: mol_type = other DNA
tcaatcttctcgaggattgg

SEQ ID NO: 1177 - DNA, 20 bp, synthetic construct
  source 1..20: mol_type = other DNA
tcaataggcctgttaatagg

SEQ ID NO: 1178 - DNA, 20 bp, synthetic construct
  source 1..20: mol_type = other DNA
tcaaggtcggtcgttgacat

SEQ ID NO: 1179 - DNA, 20 bp, synthetic construct
  source 1..20: mol_type = other DNA
tcaagatgctgtacagactt

SEQ ID NO: 1180 - DNA, 20 bp, synthetic construct
  source 1..20: mol_type = other DNA
tcaacactaatatgggccta

SEQ ID NO: 1181 - DNA, 20 bp, synthetic construct
  source 1..20: mol_type = other DNA
tatttggtaacctttggata

SEQ ID NO: 1182 - DNA, 20 bp, synthetic construct
  source 1..20: mol_type = other DNA
tatttgcgggagaggacaac

SEQ ID NO: 1183 - DNA, 20 bp, synthetic construct
  source 1..20: mol_type = other DNA
tatttccctgctggtggctc

SEQ ID NO: 1184 - DNA, 21 bp, synthetic construct
  source 1..21: mol_type = other DNA
tatttacacactctatggaag

SEQ ID NO: 1185 - DNA, 20 bp, synthetic construct
  source 1..20: mol_type = other DNA
tatttacacactctatggaa

SEQ ID NO: 1186 - DNA, 20 bp, synthetic construct
  source 1..20: mol_type = other DNA
tattgggggccaagtctgta

SEQ ID NO: 1187 - DNA, 21 bp, synthetic construct
  source 1..21: mol_type = other DNA
tattgattggaaagtatgtca

SEQ ID NO: 1188 - DNA, 21 bp, synthetic construct
  source 1..21: mol_type = other DNA
tattcttctactgtacctgtc

SEQ ID NO: 1189 - DNA, 20 bp, synthetic construct
  source 1..20: mol_type = other DNA
tattccttggactcataagg

SEQ ID NO: 1190 - DNA, 20 bp, synthetic construct
  source 1..20: mol_type = other DNA
tattcccatcccatcatcct

SEQ ID NO: 1191 - DNA, 20 bp, synthetic construct
  source 1..20: mol_type = other DNA
tattatccagaacatctagt

SEQ ID NO: 1192 - DNA, 21 bp, synthetic construct
  source 1..21: mol_type = other DNA
tattaggaaaagatggtgttt

SEQ ID NO: 1193 - DNA, 21 bp, synthetic construct
  source 1..21: mol_type = other DNA
tattaacaggcctattgattg

SEQ ID NO: 1194 - DNA, 20 bp, synthetic construct
  source 1..20: mol_type = other DNA
tattaacaggcctattgatt

SEQ ID NO: 1195 - DNA, 20 bp, synthetic construct
  source 1..20: mol_type = other DNA
tatgttgcccgtttgtcctc

SEQ ID NO: 1196 - DNA, 20 bp, synthetic construct
  source 1..20: mol_type = other DNA
tatgtatccctcctgttgct

SEQ ID NO: 1197 - DNA, 21 bp, synthetic construct
  source 1..21: mol_type = other DNA
tatgtaagaccttgggcaaca

SEQ ID NO: 1198 - DNA, 20 bp, synthetic construct
  source 1..20: mol_type = other DNA
tatggtgaggtgaacaatgc

SEQ ID NO: 1199 - DNA, 20 bp, synthetic construct
  source 1..20: mol_type = other DNA
tatggtgacccacaaaatga

SEQ ID NO: 1200 - DNA, 20 bp, synthetic construct
  source 1..20: mol_type = other DNA
tatggatcggcagaggagcc

SEQ ID NO: 1201 - DNA, 21 bp, synthetic construct
  source 1..21: mol_type = other DNA
tatgcctgctaggttttatcc

SEQ ID NO: 1202 - DNA, 20 bp, synthetic construct
  source 1..20: mol_type = other DNA
tatgcctgctaggttttatc

SEQ ID NO: 1203 - DNA, 20 bp, synthetic construct
  source 1..20: mol_type = other DNA
tatgcctcaaggtcggtcgt

SEQ ID NO: 1204 - DNA, 20 bp, synthetic construct
  source 1..20: mol_type = other DNA
tatgatgtgttcttgtggca

SEQ ID NO: 1205 - DNA, 20 bp, synthetic construct
  source 1..20: mol_type = other DNA
tatctagaagatctcgtact

SEQ ID NO: 1206 - DNA, 20 bp, synthetic construct
  source 1..20: mol_type = other DNA
tatcctatcaacacttccgg

SEQ ID NO: 1207 - DNA, 20 bp, synthetic construct
  source 1..20: mol_type = other DNA
tatccctcctgttgctgtac

SEQ ID NO: 1208 - DNA, 20 bp, synthetic construct
  source 1..20: mol_type = other DNA
tatccatggctgctaggctg

SEQ ID NO: 1209 - DNA, 20 bp, synthetic construct
  source 1..20: mol_type = other DNA
tatcatcttcctcttcatcc

SEQ ID NO: 1210 - DNA, 21 bp, synthetic construct
  source 1..21: mol_type = other DNA
tatatttgcgggagaggacaa

SEQ ID NO: 1211 - DNA, 20 bp, synthetic construct
  source 1..20: mol_type = other DNA
tatattatataagagagaaa

SEQ ID NO: 1212 - DNA, 20 bp, synthetic construct
  source 1..20: mol_type = other DNA
tatatggatgatgtggtatt

SEQ ID NO: 1213 - DNA, 21 bp, synthetic construct
  source 1..21: mol_type = other DNA
tatagagtatttggtgtcttt

SEQ ID NO: 1214 - DNA, 20 bp, synthetic construct
  source 1..20: mol_type = other DNA
tatacatttaaaccctaaca

SEQ ID NO: 1215 - DNA, 20 bp, synthetic construct
  source 1..20: mol_type = other DNA
tataatatacccgccttcca

SEQ ID NO: 1216 - DNA, 20 bp, synthetic construct
  source 1..20: mol_type = other DNA
tataagagagaaacaacaca

SEQ ID NO: 1217 - DNA, 20 bp, synthetic construct
  source 1..20: mol_type = other DNA
tataactgaaagccaaacag

SEQ ID NO: 1218 - DNA, 20 bp, synthetic construct
  source 1..20: mol_type = other DNA
tataacggtttctcttccaa

SEQ ID NO: 1219 - DNA, 21 bp, synthetic construct
  source 1..21: mol_type = other DNA
tagtttggaagtaatgattaa

SEQ ID NO: 1220 - DNA, 20 bp, synthetic construct
  source 1..20: mol_type = other DNA
tagtttccggaagtgttgat

SEQ ID NO: 1221 - DNA, 20 bp, synthetic construct
  source 1..20: mol_type = other DNA
tagttccccctagaaaattg

SEQ ID NO: 1222 - DNA, 21 bp, synthetic construct
  source 1..21: mol_type = other DNA
tagtgttgacataactgacta

SEQ ID NO: 1223 - DNA, 20 bp, synthetic construct
  source 1..20: mol_type = other DNA
tagtccagaagaaccaacaa

SEQ ID NO: 1224 - DNA, 20 bp, synthetic construct
  source 1..20: mol_type = other DNA
tagtattccttggactcata

SEQ ID NO: 1225 - DNA, 20 bp, synthetic construct
  source 1..20: mol_type = other DNA
tagtatgccctgagcctgag

SEQ ID NO: 1226 - DNA, 20 bp, synthetic construct
  source 1..20: mol_type = other DNA
tagtacaaagacctttaatc

SEQ ID NO: 1227 - DNA, 20 bp, synthetic construct
  source 1..20: mol_type = other DNA
tagggtttaaatgtataccc

SEQ ID NO: 1228 - DNA, 20 bp, synthetic construct
  source 1..20: mol_type = other DNA
taggggcatttggtggtcta

SEQ ID NO: 1229 - DNA, 20 bp, synthetic construct
  source 1..20: mol_type = other DNA
tagggctttcccccactgtt

SEQ ID NO: 1230 - DNA, 20 bp, synthetic construct
  source 1..20: mol_type = other DNA
taggctgccttcctgtctgg

SEQ ID NO: 1231 - DNA, 20 bp, synthetic construct
  source 1..20: mol_type = other DNA
taggcccacttacagttaat

SEQ ID NO: 1232 - DNA, 21 bp, synthetic construct
  source 1..21: mol_type = other DNA
taggcagaggtgaaaaagttg

SEQ ID NO: 1233 - DNA, 20 bp, synthetic construct
  source 1..20: mol_type = other DNA
taggaccccttctcgtgtta

SEQ ID NO: 1234 - DNA, 20 bp, synthetic construct
  source 1..20: mol_type = other DNA
taggaattttccgaaagccc

SEQ ID NO: 1235 - DNA, 20 bp, synthetic construct
  source 1..20: mol_type = other DNA
taggaaaagatggtgttttc

SEQ ID NO: 1236 - DNA, 20 bp, synthetic construct
  source 1..20: mol_type = other DNA
tagctccaaattctttataa

SEQ ID NO: 1237 - DNA, 21 bp, synthetic construct
  source 1..21: mol_type = other DNA
tagccgcttgttttgctcgca

SEQ ID NO: 1238 - DNA, 20 bp, synthetic construct
  source 1..20: mol_type = other DNA
tagccgcttgttttgctcgc

SEQ ID NO: 1239 - DNA, 21 bp, synthetic construct
  source 1..21: mol_type = other DNA
tagcagcaggatgaagaggaa

SEQ ID NO: 1240 - DNA, 20 bp, synthetic construct
  source 1..20: mol_type = other DNA
tagcagcaggatgaagagga

SEQ ID NO: 1241 - DNA, 20 bp, synthetic construct
  source 1..20: mol_type = other DNA
tagattgaatacatgcatac

SEQ ID NO: 1242 - DNA, 20 bp, synthetic construct
  source 1..20: mol_type = other DNA
tagattaaaggtctttgtac

SEQ ID NO: 1243 - DNA, 21 bp, synthetic construct
  source 1..21: mol_type = other DNA
tagatgttctggataataagg

SEQ ID NO: 1244 - DNA, 20 bp, synthetic construct
  source 1..20: mol_type = other DNA
tagagtgtgtaaatagtgtc

SEQ ID NO: 1245 - DNA, 20 bp, synthetic construct
  source 1..20: mol_type = other DNA
tagagtcattagttcccccc

SEQ ID NO: 1246 - DNA, 20 bp, synthetic construct
  source 1..20: mol_type = other DNA
tagagtatttggtgtctttc

SEQ ID NO: 1247 - DNA, 20 bp, synthetic construct
  source 1..20: mol_type = other DNA
tagactctgcggtattgtga

SEQ ID NO: 1248 - DNA, 20 bp, synthetic construct
  source 1..20: mol_type = other DNA
tagaagatctcgtactgaag

SEQ ID NO: 1249 - DNA, 20 bp, synthetic construct
  source 1..20: mol_type = other DNA
tagaagaataaagaccagta

SEQ ID NO: 1250 - DNA, 20 bp, synthetic construct
  source 1..20: mol_type = other DNA
tagaaaacttcctattaaca

SEQ ID NO: 1251 - DNA, 20 bp, synthetic construct
  source 1..20: mol_type = other DNA
tacttcaaagactgtttgtt

SEQ ID NO: 1252 - DNA, 20 bp, synthetic construct
  source 1..20: mol_type = other DNA
tactgcctctcccttatcgt

SEQ ID NO: 1253 - DNA, 20 bp, synthetic construct
  source 1..20: mol_type = other DNA
tactgaaggaaagaagtcag

SEQ ID NO: 1254 - DNA, 20 bp, synthetic construct
  source 1..20: mol_type = other DNA
tactagtgccatttgttcag

SEQ ID NO: 1255 - DNA, 20 bp, synthetic construct
  source 1..20: mol_type = other DNA
tactaggaggctgtaggcat

SEQ ID NO: 1256 - DNA, 20 bp, synthetic construct
  source 1..20: mol_type = other DNA
tacgatgtatatttgcggga

SEQ ID NO: 1257 - DNA, 20 bp, synthetic construct
  source 1..20: mol_type = other DNA
taccttgttggcgtctggcc

SEQ ID NO: 1258 - DNA, 20 bp, synthetic construct
  source 1..20: mol_type = other DNA
tacctgtctttaatcctcat

SEQ ID NO: 1259 - DNA, 20 bp, synthetic construct
  source 1..20: mol_type = other DNA
tacctgggtgggtgttaatt

SEQ ID NO: 1260 - DNA, 20 bp, synthetic construct
  source 1..20: mol_type = other DNA
tacctgaacctttaccccgt

SEQ ID NO: 1261 - DNA, 20 bp, synthetic construct
  source 1..20: mol_type = other DNA
taccgcctcagctctgtatc

SEQ ID NO: 1262 - DNA, 21 bp, synthetic construct
  source 1..21: mol_type = other DNA
tacccgccttccatagagtgt

SEQ ID NO: 1263 - DNA, 21 bp, synthetic construct
  source 1..21: mol_type = other DNA
taccccgttgcccggcaacgg

SEQ ID NO: 1264 - DNA, 20 bp, synthetic construct
  source 1..20: mol_type = other DNA
taccccgctgtctccacctt

SEQ ID NO: 1265 - DNA, 20 bp, synthetic construct
  source 1..20: mol_type = other DNA
taccattggataagggtatt

SEQ ID NO: 1266 - DNA, 20 bp, synthetic construct
  source 1..20: mol_type = other DNA
taccaattttcttttgtctt

SEQ ID NO: 1267 - DNA, 20 bp, synthetic construct
  source 1..20: mol_type = other DNA
tacatcgtatccatggctgc

SEQ ID NO: 1268 - DNA, 20 bp, synthetic construct
  source 1..20: mol_type = other DNA
tacagtagaagaataaagac

SEQ ID NO: 1269 - DNA, 20 bp, synthetic construct
  source 1..20: mol_type = other DNA
tacaggtgcaatttccgtcc

SEQ ID NO: 1270 - DNA, 20 bp, synthetic construct
  source 1..20: mol_type = other DNA
tacagagctgaggcggtatc

SEQ ID NO: 1271 - DNA, 20 bp, synthetic construct
  source 1..20: mol_type = other DNA
tacaccaagacattatcaaa

SEQ ID NO: 1272 - DNA, 21 bp, synthetic construct
  source 1..21: mol_type = other DNA
tacaaactgttcacatttttt

SEQ ID NO: 1273 - DNA, 20 bp, synthetic construct
  source 1..20: mol_type = other DNA
tacaaactgttcacattttt

SEQ ID NO: 1274 - DNA, 21 bp, synthetic construct
  source 1..21: mol_type = other DNA
taatgcccttgtatgcatgta

SEQ ID NO: 1275 - DNA, 20 bp, synthetic construct
  source 1..20: mol_type = other DNA
taatgattaactagatgttc

SEQ ID NO: 1276 - DNA, 21 bp, synthetic construct
  source 1..21: mol_type = other DNA
taatgagaaaagaagattgca

SEQ ID NO: 1277 - DNA, 21 bp, synthetic construct
  source 1..21: mol_type = other DNA
taatctcctcccccaactcct

SEQ ID NO: 1278 - DNA, 20 bp, synthetic construct
  source 1..20: mol_type = other DNA
taatatgggcctaaagttca

SEQ ID NO: 1279 - DNA, 20 bp, synthetic construct
  source 1..20: mol_type = other DNA
taatatacccgccttccata

SEQ ID NO: 1280 - DNA, 20 bp, synthetic construct
  source 1..20: mol_type = other DNA
taatacccttatccaatggt

SEQ ID NO: 1281 - DNA, 21 bp, synthetic construct
  source 1..21: mol_type = other DNA
taataaggtttaataccctta

SEQ ID NO: 1282 - DNA, 20 bp, synthetic construct
  source 1..20: mol_type = other DNA
taagttggcgagaaagtgaa

SEQ ID NO: 1283 - DNA, 21 bp, synthetic construct
  source 1..21: mol_type = other DNA
taaggtttaatacccttatcc

SEQ ID NO: 1284 - DNA, 20 bp, synthetic construct
  source 1..20: mol_type = other DNA
taaggtttaatacccttatc

SEQ ID NO: 1285 - DNA, 20 bp, synthetic construct
  source 1..20: mol_type = other DNA
taagggagaggcagtagtcg

SEQ ID NO: 1286 - DNA, 20 bp, synthetic construct
  source 1..20: mol_type = other DNA
taagcaggctttcactttct

SEQ ID NO: 1287 - DNA, 21 bp, synthetic construct
  source 1..21: mol_type = other DNA
taagaggactcttggactctc

SEQ ID NO: 1288 - DNA, 20 bp, synthetic construct
  source 1..20: mol_type = other DNA
taactgactactaggtctct

SEQ ID NO: 1289 - DNA, 20 bp, synthetic construct
  source 1..20: mol_type = other DNA
taactgaaagccaaacagtg

SEQ ID NO: 1290 - DNA, 20 bp, synthetic construct
  source 1..20: mol_type = other DNA
taactagatgttctggataa

SEQ ID NO: 1291 - DNA, 20 bp, synthetic construct
  source 1..20: mol_type = other DNA
taaccaggacaagttggagg

SEQ ID NO: 1292 - DNA, 20 bp, synthetic construct
  source 1..20: mol_type = other DNA
taaccacattgtgtaaatgg

SEQ ID NO: 1293 - DNA, 21 bp, synthetic construct
  source 1..21: mol_type = other DNA
taacattgaggttcccgagat

SEQ ID NO: 1294 - DNA, 20 bp, synthetic construct
  source 1..20: mol_type = other DNA
taacaggcctattgattgga

SEQ ID NO: 1295 - DNA, 21 bp, synthetic construct
  source 1..21: mol_type = other DNA
taacagcggtaaaaagggact

SEQ ID NO: 1296 - DNA, 20 bp, synthetic construct
  source 1..20: mol_type = other DNA
taacacgagaaggggtccta

SEQ ID NO: 1297 - DNA, 20 bp, synthetic construct
  source 1..20: mol_type = other DNA
taacacccacccaggtagct

SEQ ID NO: 1298 - DNA, 20 bp, synthetic construct
  source 1..20: mol_type = other DNA
taaatgtatacccaaagaca

SEQ ID NO: 1299 - DNA, 20 bp, synthetic construct
  source 1..20: mol_type = other DNA
taaatggggcagcaaaaccc

SEQ ID NO: 1300 - DNA, 20 bp, synthetic construct
  source 1..20: mol_type = other DNA
taaagttcaggcaactcttg

SEQ ID NO: 1301 - DNA, 20 bp, synthetic construct
  source 1..20: mol_type = other DNA
taaaggtctttgtactagga

SEQ ID NO: 1302 - DNA, 21 bp, synthetic construct
  source 1..21: mol_type = other DNA
taaagagaggtgcgccccgtg

SEQ ID NO: 1303 - DNA, 20 bp, synthetic construct
  source 1..20: mol_type = other DNA
taaagactgggaggagttgg

SEQ ID NO: 1304 - DNA, 20 bp, synthetic construct
  source 1..20: mol_type = other DNA
taaagacaggtacagtagaa

SEQ ID NO: 1305 - DNA, 20 bp, synthetic construct
  source 1..20: mol_type = other DNA
taaagaatttggagctactg

SEQ ID NO: 1306 - DNA, 20 bp, synthetic construct
  source 1..20: mol_type = other DNA
taaactgagccaggagaaac

SEQ ID NO: 1307 - DNA, 21 bp, synthetic construct
  source 1..21: mol_type = other DNA
taaaccttattatccagaaca

SEQ ID NO: 1308 - DNA, 20 bp, synthetic construct
  source 1..20: mol_type = other DNA
taaaccctaacaaaacaaag

SEQ ID NO: 1309 - DNA, 20 bp, synthetic construct
  source 1..20: mol_type = other DNA
taaacaaaggacgtcccgcg

SEQ ID NO: 1310 - DNA, 20 bp, synthetic construct
  source 1..20: mol_type = other DNA
taaaacgccgcagacacatc

SEQ ID NO: 1311 - DNA, 20 bp, synthetic construct
  source 1..20: mol_type = other DNA
taaaacctagcaggcataat

SEQ ID NO: 1312 - DNA, 20 bp, synthetic construct
  source 1..20: mol_type = other DNA
gttttgctgccccatttaca

SEQ ID NO: 1313 - DNA, 20 bp, synthetic construct
  source 1..20: mol_type = other DNA
gttttgctcgcagcaggtct

SEQ ID NO: 1314 - DNA, 20 bp, synthetic construct
  source 1..20: mol_type = other DNA
gtttgtttaaagactgggag

SEQ ID NO: 1315 - DNA, 20 bp, synthetic construct
  source 1..20: mol_type = other DNA
gtttggtacagcaacaggag

SEQ ID NO: 1316 - DNA, 20 bp, synthetic construct
  source 1..20: mol_type = other DNA
gtttggaagtaatgattaac

SEQ ID NO: 1317 - DNA, 20 bp, synthetic construct
  source 1..20: mol_type = other DNA
gtttgctccagacctgctgc

SEQ ID NO: 1318 - DNA, 21 bp, synthetic construct
  source 1..21: mol_type = other DNA
gtttctcaaaggtggagacag

SEQ ID NO: 1319 - DNA, 20 bp, synthetic construct
  source 1..20: mol_type = other DNA
gtttcaccccaccgcacgga

SEQ ID NO: 1320 - DNA, 20 bp, synthetic construct
  source 1..20: mol_type = other DNA
gtttactgctcctgaactgg

SEQ ID NO: 1321 - DNA, 21 bp, synthetic construct
  source 1..21: mol_type = other DNA
gtttactagtgccatttgttc

SEQ ID NO: 1322 - DNA, 20 bp, synthetic construct
  source 1..20: mol_type = other DNA
gtttactagtgccatttgtt

SEQ ID NO: 1323 - DNA, 20 bp, synthetic construct
  source 1..20: mol_type = other DNA
gtttacgtcccgtcggcgct

SEQ ID NO: 1324 - DNA, 20 bp, synthetic construct
  source 1..20: mol_type = other DNA
gtttacacagaaaggccttg

SEQ ID NO: 1325 - DNA, 21 bp, synthetic construct
  source 1..21: mol_type = other DNA
gtttaatacccttatccaatg

SEQ ID NO: 1326 - DNA, 20 bp, synthetic construct
  source 1..20: mol_type = other DNA
gtttaaagactgggaggagt

SEQ ID NO: 1327 - DNA, 20 bp, synthetic construct
  source 1..20: mol_type = other DNA
gttggttcttctggactatc

SEQ ID NO: 1328 - DNA, 20 bp, synthetic construct
  source 1..20: mol_type = other DNA
gttggtgagtgattggaggt

SEQ ID NO: 1329 - DNA, 21 bp, synthetic construct
  source 1..21: mol_type = other DNA
gttgggggaggagattagatt

SEQ ID NO: 1330 - DNA, 20 bp, synthetic construct
  source 1..20: mol_type = other DNA
gttgggggaggagattagat

SEQ ID NO: 1331 - DNA, 20 bp, synthetic construct
  source 1..20: mol_type = other DNA
gttggatccagccttcagag

SEQ ID NO: 1332 - DNA, 20 bp, synthetic construct
  source 1..20: mol_type = other DNA
gttggaggacaggaggttgg

SEQ ID NO: 1333 - DNA, 20 bp, synthetic construct
  source 1..20: mol_type = other DNA
gttgccgggcaacggggtaa

SEQ ID NO: 1334 - DNA, 20 bp, synthetic construct
  source 1..20: mol_type = other DNA
gttgcccaaggtcttacata

SEQ ID NO: 1335 - DNA, 20 bp, synthetic construct
  source 1..20: mol_type = other DNA
gttgcatggtgctggtgcgc

SEQ ID NO: 1336 - DNA, 21 bp, synthetic construct
  source 1..21: mol_type = other DNA
gttgataggataggggcattt

SEQ ID NO: 1337 - DNA, 20 bp, synthetic construct
  source 1..20: mol_type = other DNA
gttgataggataggggcatt

SEQ ID NO: 1338 - DNA, 20 bp, synthetic construct
  source 1..20: mol_type = other DNA
gttgaggatcctggaattag

SEQ ID NO: 1339 - DNA, 20 bp, synthetic construct
  source 1..20: mol_type = other DNA
gttgacattgcagagagtcc

SEQ ID NO: 1340 - DNA, 20 bp, synthetic construct
  source 1..20: mol_type = other DNA
gttcttgtggcaaggaccca

SEQ ID NO: 1341 - DNA, 20 bp, synthetic construct
  source 1..20: mol_type = other DNA
gttccgcagtatggatcggc

SEQ ID NO: 1342 - DNA, 20 bp, synthetic construct
  source 1..20: mol_type = other DNA
gttccccctagaaaattgag

SEQ ID NO: 1343 - DNA, 21 bp, synthetic construct
  source 1..21: mol_type = other DNA
gttccccaccttatgagtcca

SEQ ID NO: 1344 - DNA, 20 bp, synthetic construct
  source 1..20: mol_type = other DNA
gttccccaccttatgagtcc

SEQ ID NO: 1345 - DNA, 20 bp, synthetic construct
  source 1..20: mol_type = other DNA
gttcaggtattgtttacaca

SEQ ID NO: 1346 - DNA, 21 bp, synthetic construct
  source 1..21: mol_type = other DNA
gttcacattttttgataatgt

SEQ ID NO: 1347 - DNA, 20 bp, synthetic construct
  source 1..20: mol_type = other DNA
gttatgtcattggaagttat

SEQ ID NO: 1348 - DNA, 20 bp, synthetic construct
  source 1..20: mol_type = other DNA
gttatgtcaacactaatatg

SEQ ID NO: 1349 - DNA, 20 bp, synthetic construct
  source 1..20: mol_type = other DNA
gttatgggtccttgccacaa

SEQ ID NO: 1350 - DNA, 20 bp, synthetic construct
  source 1..20: mol_type = other DNA
gttatcgctggatgtgtctg

SEQ ID NO: 1351 - DNA, 20 bp, synthetic construct
  source 1..20: mol_type = other DNA
gttagtattccttggactca

SEQ ID NO: 1352 - DNA, 21 bp, synthetic construct
  source 1..21: mol_type = other DNA
gttaccaattttcttttgtct

SEQ ID NO: 1353 - DNA, 20 bp, synthetic construct
  source 1..20: mol_type = other DNA
gttaccaaatatttaccatt

SEQ ID NO: 1354 - DNA, 20 bp, synthetic construct
  source 1..20: mol_type = other DNA
gttaatcattacttccaaac

SEQ ID NO: 1355 - DNA, 20 bp, synthetic construct
  source 1..20: mol_type = other DNA
gtgttttccaatgaggatta

SEQ ID NO: 1356 - DNA, 20 bp, synthetic construct
  source 1..20: mol_type = other DNA
gtgtttctcaaaggtggaga

SEQ ID NO: 1357 - DNA, 20 bp, synthetic construct
  source 1..20: mol_type = other DNA
gtgttgacataactgactac

SEQ ID NO: 1358 - DNA, 20 bp, synthetic construct
  source 1..20: mol_type = other DNA
gtgtggattcgcactcctcc

SEQ ID NO: 1359 - DNA, 20 bp, synthetic construct
  source 1..20: mol_type = other DNA
gtgtaaatgtatattaggaa

SEQ ID NO: 1360 - DNA, 20 bp, synthetic construct
  source 1..20: mol_type = other DNA
gtgtaaatagtgtctagttt

SEQ ID NO: 1361 - DNA, 20 bp, synthetic construct
  source 1..20: mol_type = other DNA
gtggttgaggatcctggaat

SEQ ID NO: 1362 - DNA, 20 bp, synthetic construct
  source 1..20: mol_type = other DNA
gtggtcgggaaagaatccca

SEQ ID NO: 1363 - DNA, 20 bp, synthetic construct
  source 1..20: mol_type = other DNA
gtgggtcttttgggttttgc

SEQ ID NO: 1364 - DNA, 20 bp, synthetic construct
  source 1..20: mol_type = other DNA
gtgggtcaccatattcttgg

SEQ ID NO: 1365 - DNA, 20 bp, synthetic construct
  source 1..20: mol_type = other DNA
gtggaggcaggaggcggatt

SEQ ID NO: 1366 - DNA, 20 bp, synthetic construct
  source 1..20: mol_type = other DNA
gtggagacagcggggtaggc

SEQ ID NO: 1367 - DNA, 20 bp, synthetic construct
  source 1..20: mol_type = other DNA
gtggacttctctcaattttc

SEQ ID NO: 1368 - DNA, 20 bp, synthetic construct
  source 1..20: mol_type = other DNA
gtgctggtggttgaggatcc

SEQ ID NO: 1369 - DNA, 20 bp, synthetic construct
  source 1..20: mol_type = other DNA
gtgctgccaactggatcctg

SEQ ID NO: 1370 - DNA, 20 bp, synthetic construct
  source 1..20: mol_type = other DNA
gtgcgccccgtggtcggtcg

SEQ ID NO: 1371 - DNA, 20 bp, synthetic construct
  source 1..20: mol_type = other DNA
gtgcgaatccacactccgaa

SEQ ID NO: 1372 - DNA, 20 bp, synthetic construct
  source 1..20: mol_type = other DNA
gtgccaagtgtttgctgacg

SEQ ID NO: 1373 - DNA, 20 bp, synthetic construct
  source 1..20: mol_type = other DNA
gtgcagtatggtgaggtgaa

SEQ ID NO: 1374 - DNA, 20 bp, synthetic construct
  source 1..20: mol_type = other DNA
gtgcacacggtccggcagat

SEQ ID NO: 1375 - DNA, 20 bp, synthetic construct
  source 1..20: mol_type = other DNA
gtgatgttctccatgttcag

SEQ ID NO: 1376 - DNA, 20 bp, synthetic construct
  source 1..20: mol_type = other DNA
gtgaggtgaacaatgctcag

SEQ ID NO: 1377 - DNA, 20 bp, synthetic construct
  source 1..20: mol_type = other DNA
gtgaggattcttgtcaacaa

SEQ ID NO: 1378 - DNA, 21 bp, synthetic construct
  source 1..21: mol_type = other DNA
gtgagaggcctgtatttccct

SEQ ID NO: 1379 - DNA, 20 bp, synthetic construct
  source 1..20: mol_type = other DNA
gtgagaggcctgtatttccc

SEQ ID NO: 1380 - DNA, 20 bp, synthetic construct
  source 1..20: mol_type = other DNA
gtgaaaccacaagagttgcc

SEQ ID NO: 1381 - DNA, 20 bp, synthetic construct
  source 1..20: mol_type = other DNA
gtgaaaaagttgcatggtgc

SEQ ID NO: 1382 - DNA, 20 bp, synthetic construct
  source 1..20: mol_type = other DNA
gtctttgtactaggaggctg

SEQ ID NO: 1383 - DNA, 21 bp, synthetic construct
  source 1..21: mol_type = other DNA
gtctttgaagtatgcctcaag

SEQ ID NO: 1384 - DNA, 20 bp, synthetic construct
  source 1..20: mol_type = other DNA
gtctttaaacaaacagtctt

SEQ ID NO: 1385 - DNA, 20 bp, synthetic construct
  source 1..20: mol_type = other DNA
gtcttggtgtaaatgtatat

SEQ ID NO: 1386 - DNA, 20 bp, synthetic construct
  source 1..20: mol_type = other DNA
gtcttacataagaggactct

SEQ ID NO: 1387 - DNA, 20 bp, synthetic construct
  source 1..20: mol_type = other DNA
gtctgtgccttctcatctgc

SEQ ID NO: 1388 - DNA, 20 bp, synthetic construct
  source 1..20: mol_type = other DNA
gtctggcgattggtggaggc

SEQ ID NO: 1389 - DNA, 20 bp, synthetic construct
  source 1..20: mol_type = other DNA
gtctggccaggtgtccttgt

SEQ ID NO: 1390 - DNA, 20 bp, synthetic construct
  source 1..20: mol_type = other DNA
gtctggagcaaacattatcg

SEQ ID NO: 1391 - DNA, 20 bp, synthetic construct
  source 1..20: mol_type = other DNA
gtctgcgcaccagcaccatg

SEQ ID NO: 1392 - DNA, 20 bp, synthetic construct
  source 1..20: mol_type = other DNA
gtctataagctggaggagtg

SEQ ID NO: 1393 - DNA, 21 bp, synthetic construct
  source 1..21: mol_type = other DNA
gtctagactctgcggtattgt

SEQ ID NO: 1394 - DNA, 20 bp, synthetic construct
  source 1..20: mol_type = other DNA
gtctagactctgcggtattg

SEQ ID NO: 1395 - DNA, 20 bp, synthetic construct
  source 1..20: mol_type = other DNA
gtctaacaacagtagtttcc

SEQ ID NO: 1396 - DNA, 20 bp, synthetic construct
  source 1..20: mol_type = other DNA
gtcggtcgttgacattgcag

SEQ ID NO: 1397 - DNA, 20 bp, synthetic construct
  source 1..20: mol_type = other DNA
gtcggtcggaacggcagacg

SEQ ID NO: 1398 - DNA, 20 bp, synthetic construct
  source 1..20: mol_type = other DNA
gtcggaacggcagacggaga

SEQ ID NO: 1399 - DNA, 20 bp, synthetic construct
  source 1..20: mol_type = other DNA
gtcgcagaagatctcaatct

SEQ ID NO: 1400 - DNA, 20 bp, synthetic construct
  source 1..20: mol_type = other DNA
gtcctttgtttacgtcccgt

SEQ ID NO: 1401 - DNA, 20 bp, synthetic construct
  source 1..20: mol_type = other DNA
gtcctcttatgtaagacctt

SEQ ID NO: 1402 - DNA, 20 bp, synthetic construct
  source 1..20: mol_type = other DNA
gtcctactgttcaagcctcc

SEQ ID NO: 1403 - DNA, 20 bp, synthetic construct
  source 1..20: mol_type = other DNA
gtccggcagatgagaaggca

SEQ ID NO: 1404 - DNA, 20 bp, synthetic construct
  source 1..20: mol_type = other DNA
gtcccgtcggcgctgaatcc

SEQ ID NO: 1405 - DNA, 20 bp, synthetic construct
  source 1..20: mol_type = other DNA
gtcccgcgcaggatccagtt

SEQ ID NO: 1406 - DNA, 20 bp, synthetic construct
  source 1..20: mol_type = other DNA
gtcccgataatgtttgctcc

SEQ ID NO: 1407 - DNA, 20 bp, synthetic construct
  source 1..20: mol_type = other DNA
gtcccaagcgaccccgagaa

SEQ ID NO: 1408 - DNA, 20 bp, synthetic construct
  source 1..20: mol_type = other DNA
gtccatgccccaaagccacc

SEQ ID NO: 1409 - DNA, 20 bp, synthetic construct
  source 1..20: mol_type = other DNA
gtccagaagaaccaacaaga

SEQ ID NO: 1410 - DNA, 20 bp, synthetic construct
  source 1..20: mol_type = other DNA
gtccaaggaatactaacatt

SEQ ID NO: 1411 - DNA, 20 bp, synthetic construct
  source 1..20: mol_type = other DNA
gtccaagagtcctcttatgt

SEQ ID NO: 1412 - DNA, 20 bp, synthetic construct
  source 1..20: mol_type = other DNA
gtcattagttccccccagca

SEQ ID NO: 1413 - DNA, 20 bp, synthetic construct
  source 1..20: mol_type = other DNA
gtcaccatattcttgggaac

SEQ ID NO: 1414 - DNA, 20 bp, synthetic construct
  source 1..20: mol_type = other DNA
gtcaatcttctcgaggattg

SEQ ID NO: 1415 - DNA, 20 bp, synthetic construct
  source 1..20: mol_type = other DNA
gtcaacactaatatgggcct

SEQ ID NO: 1416 - DNA, 21 bp, synthetic construct
  source 1..21: mol_type = other DNA
gtatttggtgtctttcggagt

SEQ ID NO: 1417 - DNA, 20 bp, synthetic construct
  source 1..20: mol_type = other DNA
gtattcccatcccatcatcc

SEQ ID NO: 1418 - DNA, 20 bp, synthetic construct
  source 1..20: mol_type = other DNA
gtattaaaccttattatcca

SEQ ID NO: 1419 - DNA, 20 bp, synthetic construct
  source 1..20: mol_type = other DNA
gtatggatcggcagaggagc

SEQ ID NO: 1420 - DNA, 20 bp, synthetic construct
  source 1..20: mol_type = other DNA
gtatgcatgtattcaatcta

SEQ ID NO: 1421 - DNA, 20 bp, synthetic construct
  source 1..20: mol_type = other DNA
gtatgatgtgttcttgtggc

SEQ ID NO: 1422 - DNA, 20 bp, synthetic construct
  source 1..20: mol_type = other DNA
gtatctagaagatctcgtac

SEQ ID NO: 1423 - DNA, 20 bp, synthetic construct
  source 1..20: mol_type = other DNA
gtatacccaaagacaaaaga

SEQ ID NO: 1424 - DNA, 20 bp, synthetic construct
  source 1..20: mol_type = other DNA
gtatacatttaaaccctaac

SEQ ID NO: 1425 - DNA, 20 bp, synthetic construct
  source 1..20: mol_type = other DNA
gtagtttccggaagtgttga

SEQ ID NO: 1426 - DNA, 20 bp, synthetic construct
  source 1..20: mol_type = other DNA
gtagttccccctagaaaatt

SEQ ID NO: 1427 - DNA, 20 bp, synthetic construct
  source 1..20: mol_type = other DNA
gtagtcggaacagggtttac

SEQ ID NO: 1428 - DNA, 20 bp, synthetic construct
  source 1..20: mol_type = other DNA
gtagtcatgcaggttcggca

SEQ ID NO: 1429 - DNA, 20 bp, synthetic construct
  source 1..20: mol_type = other DNA
gtagtcagttatgtcaacac

SEQ ID NO: 1430 - DNA, 20 bp, synthetic construct
  source 1..20: mol_type = other DNA
gtagtatgccctgagcctga

SEQ ID NO: 1431 - DNA, 20 bp, synthetic construct
  source 1..20: mol_type = other DNA
gtaggcccacttacagttaa

SEQ ID NO: 1432 - DNA, 20 bp, synthetic construct
  source 1..20: mol_type = other DNA
gtaggcataaattggtctgc

SEQ ID NO: 1433 - DNA, 21 bp, synthetic construct
  source 1..21: mol_type = other DNA
gtaggagctggagcattcggg

SEQ ID NO: 1434 - DNA, 20 bp, synthetic construct
  source 1..20: mol_type = other DNA
gtagctccaaattctttata

SEQ ID NO: 1435 - DNA, 20 bp, synthetic construct
  source 1..20: mol_type = other DNA
gtagaagaataaagaccagt

SEQ ID NO: 1436 - DNA, 20 bp, synthetic construct
  source 1..20: mol_type = other DNA
gtactgaaggaaagaagtca

SEQ ID NO: 1437 - DNA, 20 bp, synthetic construct
  source 1..20: mol_type = other DNA
gtactaggaggctgtaggca

SEQ ID NO: 1438 - DNA, 20 bp, synthetic construct
  source 1..20: mol_type = other DNA
gtacgagatcttctagatac

SEQ ID NO: 1439 - DNA, 20 bp, synthetic construct
  source 1..20: mol_type = other DNA
gtaagttggcgagaaagtga

SEQ ID NO: 1440 - DNA, 20 bp, synthetic construct
  source 1..20: mol_type = other DNA
gtaagaccttgggcaacatt

SEQ ID NO: 1441 - DNA, 20 bp, synthetic construct
  source 1..20: mol_type = other DNA
gtaacctttggataaaacct

SEQ ID NO: 1442 - DNA, 20 bp, synthetic construct
  source 1..20: mol_type = other DNA
gtaacacgagaaggggtcct

SEQ ID NO: 1443 - DNA, 20 bp, synthetic construct
  source 1..20: mol_type = other DNA
gtaaatggggcagcaaaacc

SEQ ID NO: 1444 - DNA, 20 bp, synthetic construct
  source 1..20: mol_type = other DNA
gtaaatatttggtaaccttt

SEQ ID NO: 1445 - DNA, 21 bp, synthetic construct
  source 1..21: mol_type = other DNA
gtaaatagtgtctagtttgga

SEQ ID NO: 1446 - DNA, 20 bp, synthetic construct
  source 1..20: mol_type = other DNA
gtaaatagtgtctagtttgg

SEQ ID NO: 1447 - DNA, 20 bp, synthetic construct
  source 1..20: mol_type = other DNA
gtaaagagaggtgcgccccg

SEQ ID NO: 1448 - DNA, 20 bp, synthetic construct
  source 1..20: mol_type = other DNA
gtaaactgagccaggagaaa

SEQ ID NO: 1449 - DNA, 20 bp, synthetic construct
  source 1..20: mol_type = other DNA
gtaaaccctgttccgactac

SEQ ID NO: 1450 - DNA, 21 bp, synthetic construct
  source 1..21: mol_type = other DNA
gtaaacaaaggacgtcccgcg

SEQ ID NO: 1451 - DNA, 20 bp, synthetic construct
  source 1..20: mol_type = other DNA
gtaaacaaaggacgtcccgc

SEQ ID NO: 1452 - DNA, 20 bp, synthetic construct
  source 1..20: mol_type = other DNA
ggttttatccaaaggttacc

SEQ ID NO: 1453 - DNA, 20 bp, synthetic construct
  source 1..20: mol_type = other DNA
ggtttggtacagcaacagga

SEQ ID NO: 1454 - DNA, 20 bp, synthetic construct
  source 1..20: mol_type = other DNA
ggtttcaccccaccgcacgg

SEQ ID NO: 1455 - DNA, 20 bp, synthetic construct
  source 1..20: mol_type = other DNA
ggtttactgctcctgaactg

SEQ ID NO: 1456 - DNA, 20 bp, synthetic construct
  source 1..20: mol_type = other DNA
ggtttaatacccttatccaa

SEQ ID NO: 1457 - DNA, 20 bp, synthetic construct
  source 1..20: mol_type = other DNA
ggttggggactgcgaatttt

SEQ ID NO: 1458 - DNA, 20 bp, synthetic construct
  source 1..20: mol_type = other DNA
ggttgcgtcagcaaacactt

SEQ ID NO: 1459 - DNA, 20 bp, synthetic construct
  source 1..20: mol_type = other DNA
ggttgaggatcctggaatta

SEQ ID NO: 1460 - DNA, 21 bp, synthetic construct
  source 1..21: mol_type = other DNA
ggttcggcatggtcccgtgct

SEQ ID NO: 1461 - DNA, 20 bp, synthetic construct
  source 1..20: mol_type = other DNA
ggttcggcatggtcccgtgc

SEQ ID NO: 1462 - DNA, 21 bp, synthetic construct
  source 1..21: mol_type = other DNA
ggttccttgagcagtagtcat

SEQ ID NO: 1463 - DNA, 20 bp, synthetic construct
  source 1..20: mol_type = other DNA
ggttccttgagcagtagtca

SEQ ID NO: 1464 - DNA, 20 bp, synthetic construct
  source 1..20: mol_type = other DNA
ggttccacgcacgcgctgat

SEQ ID NO: 1465 - DNA, 20 bp, synthetic construct
  source 1..20: mol_type = other DNA
ggttcaggtattgtttacac

SEQ ID NO: 1466 - DNA, 20 bp, synthetic construct
  source 1..20: mol_type = other DNA
ggttatgtcattggaagtta

SEQ ID NO: 1467 - DNA, 20 bp, synthetic construct
  source 1..20: mol_type = other DNA
ggttactctctgaattttat

SEQ ID NO: 1468 - DNA, 20 bp, synthetic construct
  source 1..20: mol_type = other DNA
ggttaccaaatatttaccat

SEQ ID NO: 1469 - DNA, 20 bp, synthetic construct
  source 1..20: mol_type = other DNA
ggtgttttccaatgaggatt

SEQ ID NO: 1470 - DNA, 20 bp, synthetic construct
  source 1..20: mol_type = other DNA
ggtgttaatttggaagatcc

SEQ ID NO: 1471 - DNA, 20 bp, synthetic construct
  source 1..20: mol_type = other DNA
ggtgtaaatgtatattagga

SEQ ID NO: 1472 - DNA, 20 bp, synthetic construct
  source 1..20: mol_type = other DNA
ggtggtctccatgcgacgtg

SEQ ID NO: 1473 - DNA, 21 bp, synthetic construct
  source 1..21: mol_type = other DNA
ggtggtcgggaaagaatccca

SEQ ID NO: 1474 - DNA, 20 bp, synthetic construct
  source 1..20: mol_type = other DNA
ggtggtcgggaaagaatccc

SEQ ID NO: 1475 - DNA, 20 bp, synthetic construct
  source 1..20: mol_type = other DNA
ggtggggtgaaacccagccc

SEQ ID NO: 1476 - DNA, 20 bp, synthetic construct
  source 1..20: mol_type = other DNA
ggtggagccctcaggctcag

SEQ ID NO: 1477 - DNA, 20 bp, synthetic construct
  source 1..20: mol_type = other DNA
ggtggaaagattctgcccca

SEQ ID NO: 1478 - DNA, 20 bp, synthetic construct
  source 1..20: mol_type = other DNA
ggtgcgccccgtggtcggtc

SEQ ID NO: 1479 - DNA, 21 bp, synthetic construct
  source 1..21: mol_type = other DNA
ggtgcaatttccgtccgaagg

SEQ ID NO: 1480 - DNA, 20 bp, synthetic construct
  source 1..20: mol_type = other DNA
ggtgagtgattggaggttgg

SEQ ID NO: 1481 - DNA, 20 bp, synthetic construct
  source 1..20: mol_type = other DNA
ggtgaggtgaacaatgctca

SEQ ID NO: 1482 - DNA, 20 bp, synthetic construct
  source 1..20: mol_type = other DNA
ggtctgtgccaagtgtttgc

SEQ ID NO: 1483 - DNA, 20 bp, synthetic construct
  source 1..20: mol_type = other DNA
ggtctggagcaaacattatc

SEQ ID NO: 1484 - DNA, 21 bp, synthetic construct
  source 1..21: mol_type = other DNA
ggtctctagatgctggatctt

SEQ ID NO: 1485 - DNA, 20 bp, synthetic construct
  source 1..20: mol_type = other DNA
ggtcggtcgttgacattgca

SEQ ID NO: 1486 - DNA, 20 bp, synthetic construct
  source 1..20: mol_type = other DNA
ggtcggtcggaacggcagac

SEQ ID NO: 1487 - DNA, 20 bp, synthetic construct
  source 1..20: mol_type = other DNA
ggtcgggaaagaatcccaga

SEQ ID NO: 1488 - DNA, 20 bp, synthetic construct
  source 1..20: mol_type = other DNA
ggtcggaacggcagacggag

SEQ ID NO: 1489 - DNA, 20 bp, synthetic construct
  source 1..20: mol_type = other DNA
ggtcgatgtccatgccccaa

SEQ ID NO: 1490 - DNA, 20 bp, synthetic construct
  source 1..20: mol_type = other DNA
ggtcccgtgctggtggttga

SEQ ID NO: 1491 - DNA, 20 bp, synthetic construct
  source 1..20: mol_type = other DNA
ggtcatgggccatcagcgcg

SEQ ID NO: 1492 - DNA, 20 bp, synthetic construct
  source 1..20: mol_type = other DNA
ggtcaccatattcttgggaa

SEQ ID NO: 1493 - DNA, 20 bp, synthetic construct
  source 1..20: mol_type = other DNA
ggtattgtgaggattcttgt

SEQ ID NO: 1494 - DNA, 20 bp, synthetic construct
  source 1..20: mol_type = other DNA
ggtattaaaccttattatcc

SEQ ID NO: 1495 - DNA, 20 bp, synthetic construct
  source 1..20: mol_type = other DNA
ggtatacatttaaaccctaa

SEQ ID NO: 1496 - DNA, 20 bp, synthetic construct
  source 1..20: mol_type = other DNA
ggtagttccccctagaaaat

SEQ ID NO: 1497 - DNA, 20 bp, synthetic construct
  source 1..20: mol_type = other DNA
ggtaggctgccttcctgtct

SEQ ID NO: 1498 - DNA, 20 bp, synthetic construct
  source 1..20: mol_type = other DNA
ggtaggagctggagcattcg

SEQ ID NO: 1499 - DNA, 20 bp, synthetic construct
  source 1..20: mol_type = other DNA
ggtaacctttggataaaacc

SEQ ID NO: 1500 - DNA, 20 bp, synthetic construct
  source 1..20: mol_type = other DNA
ggtaaatatttggtaacctt

SEQ ID NO: 1501 - DNA, 20 bp, synthetic construct
  source 1..20: mol_type = other DNA
gggtttcaccccaccgcacg

SEQ ID NO: 1502 - DNA, 20 bp, synthetic construct
  source 1..20: mol_type = other DNA
gggtttactgctcctgaact

SEQ ID NO: 1503 - DNA, 20 bp, synthetic construct
  source 1..20: mol_type = other DNA
gggtttaaatgtatacccaa

SEQ ID NO: 1504 - DNA, 20 bp, synthetic construct
  source 1..20: mol_type = other DNA
gggttgcgtcagcaaacact

SEQ ID NO: 1505 - DNA, 20 bp, synthetic construct
  source 1..20: mol_type = other DNA
gggttactctctgaatttta

SEQ ID NO: 1506 - DNA, 20 bp, synthetic construct
  source 1..20: mol_type = other DNA
gggtgttaatttggaagatc

SEQ ID NO: 1507 - DNA, 20 bp, synthetic construct
  source 1..20: mol_type = other DNA
gggtggagccctcaggctca

SEQ ID NO: 1508 - DNA, 20 bp, synthetic construct
  source 1..20: mol_type = other DNA
gggtcgtccgcaggattcag

SEQ ID NO: 1509 - DNA, 20 bp, synthetic construct
  source 1..20: mol_type = other DNA
gggtcgatgtccatgcccca

SEQ ID NO: 1510 - DNA, 20 bp, synthetic construct
  source 1..20: mol_type = other DNA
gggtcctaggaatcctgatg

SEQ ID NO: 1511 - DNA, 21 bp, synthetic construct
  source 1..21: mol_type = other DNA
gggtcaccatattcttgggaa

SEQ ID NO: 1512 - DNA, 20 bp, synthetic construct
  source 1..20: mol_type = other DNA
gggtattaaaccttattatc

SEQ ID NO: 1513 - DNA, 20 bp, synthetic construct
  source 1..20: mol_type = other DNA
gggtatattatataagagag

SEQ ID NO: 1514 - DNA, 21 bp, synthetic construct
  source 1..21: mol_type = other DNA
gggtaggctgccttcctgtct

SEQ ID NO: 1515 - DNA, 20 bp, synthetic construct
  source 1..20: mol_type = other DNA
gggtaggctgccttcctgtc

SEQ ID NO: 1516 - DNA, 20 bp, synthetic construct
  source 1..20: mol_type = other DNA
ggggtttttcttgttgacaa

SEQ ID NO: 1517 - DNA, 20 bp, synthetic construct
  source 1..20: mol_type = other DNA
ggggtggagccctcaggctc

SEQ ID NO: 1518 - DNA, 20 bp, synthetic construct
  source 1..20: mol_type = other DNA
ggggtgaaacccagcccgaa

SEQ ID NO: 1519 - DNA, 20 bp, synthetic construct
  source 1..20: mol_type = other DNA
gggggaggagattagattaa

SEQ ID NO: 1520 - DNA, 20 bp, synthetic construct
  source 1..20: mol_type = other DNA
gggggaactaccgtgtgtct

SEQ ID NO: 1521 - DNA, 20 bp, synthetic construct
  source 1..20: mol_type = other DNA
ggggcttggtcatgggccat

SEQ ID NO: 1522 - DNA, 20 bp, synthetic construct
  source 1..20: mol_type = other DNA
ggggcgcacctctctttacg

SEQ ID NO: 1523 - DNA, 20 bp, synthetic construct
  source 1..20: mol_type = other DNA
ggggcatttggtggtctata

SEQ ID NO: 1524 - DNA, 20 bp, synthetic construct
  source 1..20: mol_type = other DNA
ggggactgcgaattttggcc

SEQ ID NO: 1525 - DNA, 20 bp, synthetic construct
  source 1..20: mol_type = other DNA
ggggacgagagagtcccaag

SEQ ID NO: 1526 - DNA, 20 bp, synthetic construct
  source 1..20: mol_type = other DNA
ggggaccctgcgctgaacat

SEQ ID NO: 1527 - DNA, 20 bp, synthetic construct
  source 1..20: mol_type = other DNA
ggggaactaccgtgtgtctt

SEQ ID NO: 1528 - DNA, 21 bp, synthetic construct
  source 1..21: mol_type = other DNA
gggctttcggaaaattcctat

SEQ ID NO: 1529 - DNA, 20 bp, synthetic construct
  source 1..20: mol_type = other DNA
gggctttcggaaaattccta

SEQ ID NO: 1530 - DNA, 20 bp, synthetic construct
  source 1..20: mol_type = other DNA
gggcttggtcatgggccatc

SEQ ID NO: 1531 - DNA, 20 bp, synthetic construct
  source 1..20: mol_type = other DNA
gggctgaggcccactcccat

SEQ ID NO: 1532 - DNA, 20 bp, synthetic construct
  source 1..20: mol_type = other DNA
gggcgcacctctctttacgc

SEQ ID NO: 1533 - DNA, 20 bp, synthetic construct
  source 1..20: mol_type = other DNA
gggcctcagcccgtttctcc

SEQ ID NO: 1534 - DNA, 20 bp, synthetic construct
  source 1..20: mol_type = other DNA
gggccatcagcgcgtgcgtg

SEQ ID NO: 1535 - DNA, 21 bp, synthetic construct
  source 1..21: mol_type = other DNA
gggccaagtctgtacagcatc

SEQ ID NO: 1536 - DNA, 20 bp, synthetic construct
  source 1..20: mol_type = other DNA
gggcatactacaaactttgc

SEQ ID NO: 1537 - DNA, 20 bp, synthetic construct
  source 1..20: mol_type = other DNA
gggcagaatctttccaccag

SEQ ID NO: 1538 - DNA, 20 bp, synthetic construct
  source 1..20: mol_type = other DNA
gggcaacggggtaaaggttc

SEQ ID NO: 1539 - DNA, 21 bp, synthetic construct
  source 1..21: mol_type = other DNA
gggcaacattcggtgggcgtt

SEQ ID NO: 1540 - DNA, 21 bp, synthetic construct
  source 1..21: mol_type = other DNA
gggatcttgcagagtttggtg

SEQ ID NO: 1541 - DNA, 20 bp, synthetic construct
  source 1..20: mol_type = other DNA
gggatcttgcagagtttggt

SEQ ID NO: 1542 - DNA, 21 bp, synthetic construct
  source 1..21: mol_type = other DNA
gggatacatagaggttccttg

SEQ ID NO: 1543 - DNA, 20 bp, synthetic construct
  source 1..20: mol_type = other DNA
gggatacatagaggttcctt

SEQ ID NO: 1544 - DNA, 21 bp, synthetic construct
  source 1..21: mol_type = other DNA
gggaggagttgggggaggaga

SEQ ID NO: 1545 - DNA, 20 bp, synthetic construct
  source 1..20: mol_type = other DNA
gggagaggcagtagtcggaa

SEQ ID NO: 1546 - DNA, 20 bp, synthetic construct
  source 1..20: mol_type = other DNA
gggactgcgaattttggcca

SEQ ID NO: 1547 - DNA, 20 bp, synthetic construct
  source 1..20: mol_type = other DNA
gggaccctgcgctgaacatg

SEQ ID NO: 1548 - DNA, 20 bp, synthetic construct
  source 1..20: mol_type = other DNA
gggaccatgccgaacctgca

SEQ ID NO: 1549 - DNA, 20 bp, synthetic construct
  source 1..20: mol_type = other DNA
gggaagccttagagtctcct

SEQ ID NO: 1550 - DNA, 20 bp, synthetic construct
  source 1..20: mol_type = other DNA
gggaaagccctacgaaccac

SEQ ID NO: 1551 - DNA, 21 bp, synthetic construct
  source 1..21: mol_type = other DNA
gggaaagaatcccagaggatt

SEQ ID NO: 1552 - DNA, 20 bp, synthetic construct
  source 1..20: mol_type = other DNA
gggaaagaatcccagaggat

SEQ ID NO: 1553 - DNA, 20 bp, synthetic construct
  source 1..20: mol_type = other DNA
ggctttcggaaaattcctat

SEQ ID NO: 1554 - DNA, 21 bp, synthetic construct
  source 1..21: mol_type = other DNA
ggctttcagttatatggatga

SEQ ID NO: 1555 - DNA, 21 bp, synthetic construct
  source 1..21: mol_type = other DNA
ggcttcccgatacagagctga

SEQ ID NO: 1556 - DNA, 20 bp, synthetic construct
  source 1..20: mol_type = other DNA
ggcttcccgatacagagctg

SEQ ID NO: 1557 - DNA, 20 bp, synthetic construct
  source 1..20: mol_type = other DNA
ggctggatccaactggtggt

SEQ ID NO: 1558 - DNA, 20 bp, synthetic construct
  source 1..20: mol_type = other DNA
ggctgaggcccactcccata

SEQ ID NO: 1559 - DNA, 20 bp, synthetic construct
  source 1..20: mol_type = other DNA
ggctccagttcaggagcagt

SEQ ID NO: 1560 - DNA, 20 bp, synthetic construct
  source 1..20: mol_type = other DNA
ggctaggagttccgcagtat

SEQ ID NO: 1561 - DNA, 20 bp, synthetic construct
  source 1..20: mol_type = other DNA
ggcgttcacggtggtctcca

SEQ ID NO: 1562 - DNA, 20 bp, synthetic construct
  source 1..20: mol_type = other DNA
ggcgggtatattatataaga

SEQ ID NO: 1563 - DNA, 21 bp, synthetic construct
  source 1..21: mol_type = other DNA
ggcggggtttttcttgttgac

SEQ ID NO: 1564 - DNA, 20 bp, synthetic construct
  source 1..20: mol_type = other DNA
ggcggggtttttcttgttga

SEQ ID NO: 1565 - DNA, 21 bp, synthetic construct
  source 1..21: mol_type = other DNA
ggcggatttgctggcaaagtt

SEQ ID NO: 1566 - DNA, 21 bp, synthetic construct
  source 1..21: mol_type = other DNA
ggcgattggtggaggcaggag

SEQ ID NO: 1567 - DNA, 20 bp, synthetic construct
  source 1..20: mol_type = other DNA
ggcgattggtggaggcagga

SEQ ID NO: 1568 - DNA, 20 bp, synthetic construct
  source 1..20: mol_type = other DNA
ggcgagggagttcttcttct

SEQ ID NO: 1569 - DNA, 21 bp, synthetic construct
  source 1..21: mol_type = other DNA
ggcgagaaagtgaaagcctgc

SEQ ID NO: 1570 - DNA, 20 bp, synthetic construct
  source 1..20: mol_type = other DNA
ggccttgtaagttggcgaga

SEQ ID NO: 1571 - DNA, 20 bp, synthetic construct
  source 1..20: mol_type = other DNA
ggcctgtatttccctgctgg

SEQ ID NO: 1572 - DNA, 20 bp, synthetic construct
  source 1..20: mol_type = other DNA
ggcctctcactctgggatct

SEQ ID NO: 1573 - DNA, 20 bp, synthetic construct
  source 1..20: mol_type = other DNA
ggcctccgtgcggtggggtg

SEQ ID NO: 1574 - DNA, 20 bp, synthetic construct
  source 1..20: mol_type = other DNA
ggcctcagcccgtttctcct

SEQ ID NO: 1575 - DNA, 20 bp, synthetic construct
  source 1..20: mol_type = other DNA
ggcccatattagtgttgaca

SEQ ID NO: 1576 - DNA, 20 bp, synthetic construct
  source 1..20: mol_type = other DNA
ggcccacttacagttaatga

SEQ ID NO: 1577 - DNA, 20 bp, synthetic construct
  source 1..20: mol_type = other DNA
ggccagacgccaacaaggta

SEQ ID NO: 1578 - DNA, 20 bp, synthetic construct
  source 1..20: mol_type = other DNA
ggcatggacatcgaccctta

SEQ ID NO: 1579 - DNA, 20 bp, synthetic construct
  source 1..20: mol_type = other DNA
ggcatagcagcaggatgaag

SEQ ID NO: 1580 - DNA, 21 bp, synthetic construct
  source 1..21: mol_type = other DNA
ggcatactacaaactttgcca

SEQ ID NO: 1581 - DNA, 20 bp, synthetic construct
  source 1..20: mol_type = other DNA
ggcatactacaaactttgcc

SEQ ID NO: 1582 - DNA, 21 bp, synthetic construct
  source 1..21: mol_type = other DNA
ggcaggaggcggatttgctgg

SEQ ID NO: 1583 - DNA, 21 bp, synthetic construct
  source 1..21: mol_type = other DNA
ggcagcaaaacccaaaagacc

SEQ ID NO: 1584 - DNA, 20 bp, synthetic construct
  source 1..20: mol_type = other DNA
ggcagatgagaaggcacaga

SEQ ID NO: 1585 - DNA, 21 bp, synthetic construct
  source 1..21: mol_type = other DNA
ggcagacggagaaggggacga

SEQ ID NO: 1586 - DNA, 20 bp, synthetic construct
  source 1..20: mol_type = other DNA
ggcagacggagaaggggacg

SEQ ID NO: 1587 - DNA, 20 bp, synthetic construct
  source 1..20: mol_type = other DNA
ggcactagtaaactgagcca

SEQ ID NO: 1588 - DNA, 20 bp, synthetic construct
  source 1..20: mol_type = other DNA
ggcacagacctggccgttgc

SEQ ID NO: 1589 - DNA, 20 bp, synthetic construct
  source 1..20: mol_type = other DNA
ggcaacggccaggtctgtgc

SEQ ID NO: 1590 - DNA, 20 bp, synthetic construct
  source 1..20: mol_type = other DNA
ggcaacataccttgatagtc

SEQ ID NO: 1591 - DNA, 20 bp, synthetic construct
  source 1..20: mol_type = other DNA
ggatttgctgtgtttgctct

SEQ ID NO: 1592 - DNA, 20 bp, synthetic construct
  source 1..20: mol_type = other DNA
ggatttgctggcaaagtttg

SEQ ID NO: 1593 - DNA, 21 bp, synthetic construct
  source 1..21: mol_type = other DNA
ggattctttcccgaccaccag

SEQ ID NO: 1594 - DNA, 20 bp, synthetic construct
  source 1..20: mol_type = other DNA
ggattaaagacaggtacagt

SEQ ID NO: 1595 - DNA, 20 bp, synthetic construct
  source 1..20: mol_type = other DNA
ggatgatgggatgggaatac

SEQ ID NO: 1596 - DNA, 20 bp, synthetic construct
  source 1..20: mol_type = other DNA
ggatgagtgtttctcaaagg

SEQ ID NO: 1597 - DNA, 20 bp, synthetic construct
  source 1..20: mol_type = other DNA
ggatgaagaggaagatgata

SEQ ID NO: 1598 - DNA, 20 bp, synthetic construct
  source 1..20: mol_type = other DNA
ggatcttgcagagtttggtg

SEQ ID NO: 1599 - DNA, 20 bp, synthetic construct
  source 1..20: mol_type = other DNA
ggatcggcagaggagccgaa

SEQ ID NO: 1600 - DNA, 20 bp, synthetic construct
  source 1..20: mol_type = other DNA
ggatcctggaattagaggac

SEQ ID NO: 1601 - DNA, 20 bp, synthetic construct
  source 1..20: mol_type = other DNA
ggatcctcaaccaccagcac

SEQ ID NO: 1602 - DNA, 21 bp, synthetic construct
  source 1..21: mol_type = other DNA
ggatccaactggtggtcggga

SEQ ID NO: 1603 - DNA, 20 bp, synthetic construct
  source 1..20: mol_type = other DNA
ggatccaactggtggtcggg

SEQ ID NO: 1604 - DNA, 20 bp, synthetic construct
  source 1..20: mol_type = other DNA
ggatacgatgtatatttgcg

SEQ ID NO: 1605 - DNA, 20 bp, synthetic construct
  source 1..20: mol_type = other DNA
ggatacatagaggttccttg

SEQ ID NO: 1606 - DNA, 20 bp, synthetic construct
  source 1..20: mol_type = other DNA
ggataaccacattgtgtaaa

SEQ ID NO: 1607 - DNA, 21 bp, synthetic construct
  source 1..21: mol_type = other DNA
ggataaaacctagcaggcata

SEQ ID NO: 1608 - DNA, 20 bp, synthetic construct
  source 1..20: mol_type = other DNA
ggagttccgcagtatggatc

SEQ ID NO: 1609 - DNA, 20 bp, synthetic construct
  source 1..20: mol_type = other DNA
ggagtgcgaatccacactcc

SEQ ID NO: 1610 - DNA, 20 bp, synthetic construct
  source 1..20: mol_type = other DNA
ggagtccgcgtaaagagagg

SEQ ID NO: 1611 - DNA, 20 bp, synthetic construct
  source 1..20: mol_type = other DNA
ggaggttggtgagtgattgg

SEQ ID NO: 1612 - DNA, 20 bp, synthetic construct
  source 1..20: mol_type = other DNA
ggagctggagcattcgggct

SEQ ID NO: 1613 - DNA, 20 bp, synthetic construct
  source 1..20: mol_type = other DNA
ggagcaaacattatcgggac

SEQ ID NO: 1614 - DNA, 20 bp, synthetic construct
  source 1..20: mol_type = other DNA
ggagaggcagtagtcggaac

SEQ ID NO: 1615 - DNA, 20 bp, synthetic construct
  source 1..20: mol_type = other DNA
ggagaggacaacagagttat

SEQ ID NO: 1616 - DNA, 21 bp, synthetic construct
  source 1..21: mol_type = other DNA
ggagaccaccgtgaacgccca

SEQ ID NO: 1617 - DNA, 21 bp, synthetic construct
  source 1..21: mol_type = other DNA
ggacctgcctcgtcgtctaac

SEQ ID NO: 1618 - DNA, 20 bp, synthetic construct
  source 1..20: mol_type = other DNA
ggacctgcctcgtcgtctaa

SEQ ID NO: 1619 - DNA, 20 bp, synthetic construct
  source 1..20: mol_type = other DNA
ggaccctgcgctgaacatgg

SEQ ID NO: 1620 - DNA, 20 bp, synthetic construct
  source 1..20: mol_type = other DNA
ggaccccttctcgtgttaca

SEQ ID NO: 1621 - DNA, 20 bp, synthetic construct
  source 1..20: mol_type = other DNA
ggacatgaacaagagatgat

SEQ ID NO: 1622 - DNA, 21 bp, synthetic construct
  source 1..21: mol_type = other DNA
ggacacctggccagacgccaa

SEQ ID NO: 1623 - DNA, 21 bp, synthetic construct
  source 1..21: mol_type = other DNA
ggacaagttggaggacaggag

SEQ ID NO: 1624 - DNA, 20 bp, synthetic construct
  source 1..20: mol_type = other DNA
ggaattagaggacaaacggg

SEQ ID NO: 1625 - DNA, 20 bp, synthetic construct
  source 1..20: mol_type = other DNA
ggaagtgttgataggatagg

SEQ ID NO: 1626 - DNA, 20 bp, synthetic construct
  source 1..20: mol_type = other DNA
ggaaggcgggtatattatat

SEQ ID NO: 1627 - DNA, 20 bp, synthetic construct
  source 1..20: mol_type = other DNA
ggaagccttagagtctcctg

SEQ ID NO: 1628 - DNA, 20 bp, synthetic construct
  source 1..20: mol_type = other DNA
ggaagatgataaaacgccgc

SEQ ID NO: 1629 - DNA, 21 bp, synthetic construct
  source 1..21: mol_type = other DNA
ggaagatccagcatctagaga

SEQ ID NO: 1630 - DNA, 21 bp, synthetic construct
  source 1..21: mol_type = other DNA
ggaactaccgtgtgtcttggc

SEQ ID NO: 1631 - DNA, 21 bp, synthetic construct
  source 1..21: mol_type = other DNA
ggaactaatgactctagctac

SEQ ID NO: 1632 - DNA, 20 bp, synthetic construct
  source 1..20: mol_type = other DNA
ggaacggcagacggagaagg

SEQ ID NO: 1633 - DNA, 20 bp, synthetic construct
  source 1..20: mol_type = other DNA
ggaacagggtttactgctcc

SEQ ID NO: 1634 - DNA, 21 bp, synthetic construct
  source 1..21: mol_type = other DNA
ggaaatacaggcctctcactc

SEQ ID NO: 1635 - DNA, 20 bp, synthetic construct
  source 1..20: mol_type = other DNA
ggaaagccctacgaaccact

SEQ ID NO: 1636 - DNA, 21 bp, synthetic construct
  source 1..21: mol_type = other DNA
ggaaagattctgccccatgct

SEQ ID NO: 1637 - DNA, 20 bp, synthetic construct
  source 1..20: mol_type = other DNA
ggaaagaagtcagaaggcaa

SEQ ID NO: 1638 - DNA, 20 bp, synthetic construct
  source 1..20: mol_type = other DNA
ggaaaattcctatgggagtg

SEQ ID NO: 1639 - DNA, 20 bp, synthetic construct
  source 1..20: mol_type = other DNA
gctttcggaaaattcctatg

SEQ ID NO: 1640 - DNA, 21 bp, synthetic construct
  source 1..21: mol_type = other DNA
gctttcccccactgtttggct

SEQ ID NO: 1641 - DNA, 20 bp, synthetic construct
  source 1..20: mol_type = other DNA
gcttggtcatgggccatcag

SEQ ID NO: 1642 - DNA, 20 bp, synthetic construct
  source 1..20: mol_type = other DNA
gcttggaggcttgaacagta

SEQ ID NO: 1643 - DNA, 21 bp, synthetic construct
  source 1..21: mol_type = other DNA
gcttgcctgagtgcagtatgg

SEQ ID NO: 1644 - DNA, 20 bp, synthetic construct
  source 1..20: mol_type = other DNA
gcttcccgatacagagctga

SEQ ID NO: 1645 - DNA, 20 bp, synthetic construct
  source 1..20: mol_type = other DNA
gctgtgtttgctctgaaggc

SEQ ID NO: 1646 - DNA, 20 bp, synthetic construct
  source 1..20: mol_type = other DNA
gctgtgccttgggtggcttt

SEQ ID NO: 1647 - DNA, 20 bp, synthetic construct
  source 1..20: mol_type = other DNA
gctgtaggcataaattggtc

SEQ ID NO: 1648 - DNA, 20 bp, synthetic construct
  source 1..20: mol_type = other DNA
gctgtagatcttgttcccaa

SEQ ID NO: 1649 - DNA, 20 bp, synthetic construct
  source 1..20: mol_type = other DNA
gctggtggttgaggatcctg

SEQ ID NO: 1650 - DNA, 20 bp, synthetic construct
  source 1..20: mol_type = other DNA
gctggtggctccagttcagg

SEQ ID NO: 1651 - DNA, 20 bp, synthetic construct
  source 1..20: mol_type = other DNA
gctggatccaactggtggtc

SEQ ID NO: 1652 - DNA, 21 bp, synthetic construct
  source 1..21: mol_type = other DNA
gctgctaggctgtgctgccaa

SEQ ID NO: 1653 - DNA, 20 bp, synthetic construct
  source 1..20: mol_type = other DNA
gctgcgagcaaaacaagcgg

SEQ ID NO: 1654 - DNA, 20 bp, synthetic construct
  source 1..20: mol_type = other DNA
gctgccccatttacacaatg

SEQ ID NO: 1655 - DNA, 20 bp, synthetic construct
  source 1..20: mol_type = other DNA
gctgaggcccactcccatag

SEQ ID NO: 1656 - DNA, 20 bp, synthetic construct
  source 1..20: mol_type = other DNA
gctctgtatcgggaagcctt

SEQ ID NO: 1657 - DNA, 20 bp, synthetic construct
  source 1..20: mol_type = other DNA
gctcgcagcaggtctggagc

SEQ ID NO: 1658 - DNA, 20 bp, synthetic construct
  source 1..20: mol_type = other DNA
gctcctgaactggagccacc

SEQ ID NO: 1659 - DNA, 20 bp, synthetic construct
  source 1..20: mol_type = other DNA
gctcctctgccgatccatac

SEQ ID NO: 1660 - DNA, 20 bp, synthetic construct
  source 1..20: mol_type = other DNA
gctcctaccttgttggcgtc

SEQ ID NO: 1661 - DNA, 20 bp, synthetic construct
  source 1..20: mol_type = other DNA
gctccagctcctaccttgtt

SEQ ID NO: 1662 - DNA, 20 bp, synthetic construct
  source 1..20: mol_type = other DNA
gctccagacctgctgcgagc

SEQ ID NO: 1663 - DNA, 21 bp, synthetic construct
  source 1..21: mol_type = other DNA
gctcaggagactctaaggctt

SEQ ID NO: 1664 - DNA, 20 bp, synthetic construct
  source 1..20: mol_type = other DNA
gctatgcctcatcttcttgt

SEQ ID NO: 1665 - DNA, 20 bp, synthetic construct
  source 1..20: mol_type = other DNA
gctaggctgtgctgccaact

SEQ ID NO: 1666 - DNA, 20 bp, synthetic construct
  source 1..20: mol_type = other DNA
gcgtcagcaaacacttggca

SEQ ID NO: 1667 - DNA, 20 bp, synthetic construct
  source 1..20: mol_type = other DNA
gcgggtatattatataagag

SEQ ID NO: 1668 - DNA, 20 bp, synthetic construct
  source 1..20: mol_type = other DNA
gcggggtttttcttgttgac

SEQ ID NO: 1669 - DNA, 21 bp, synthetic construct
  source 1..21: mol_type = other DNA
gcgggagaggacaacagagtt

SEQ ID NO: 1670 - DNA, 20 bp, synthetic construct
  source 1..20: mol_type = other DNA
gcgctgatggcccatgacca

SEQ ID NO: 1671 - DNA, 20 bp, synthetic construct
  source 1..20: mol_type = other DNA
gcgcgtgcgtggaacctttt

SEQ ID NO: 1672 - DNA, 20 bp, synthetic construct
  source 1..20: mol_type = other DNA
gcgccgacgggacgtaaaca

SEQ ID NO: 1673 - DNA, 20 bp, synthetic construct
  source 1..20: mol_type = other DNA
gcgcagggtccccaatcctc

SEQ ID NO: 1674 - DNA, 20 bp, synthetic construct
  source 1..20: mol_type = other DNA
gcgattgagaccttcgtctg

SEQ ID NO: 1675 - DNA, 20 bp, synthetic construct
  source 1..20: mol_type = other DNA
gcgataaccaggacaagttg

SEQ ID NO: 1676 - DNA, 20 bp, synthetic construct
  source 1..20: mol_type = other DNA
gcgagggagttcttcttcta

SEQ ID NO: 1677 - DNA, 20 bp, synthetic construct
  source 1..20: mol_type = other DNA
gcgagcaaaacaagcggcta

SEQ ID NO: 1678 - DNA, 20 bp, synthetic construct
  source 1..20: mol_type = other DNA
gcgacgtgcagaggtgaagc

SEQ ID NO: 1679 - DNA, 20 bp, synthetic construct
  source 1..20: mol_type = other DNA
gcgaatccacactccgaaag

SEQ ID NO: 1680 - DNA, 20 bp, synthetic construct
  source 1..20: mol_type = other DNA
gcgaagtgcacacggtccgg

SEQ ID NO: 1681 - DNA, 20 bp, synthetic construct
  source 1..20: mol_type = other DNA
gccttttggggtggagccct

SEQ ID NO: 1682 - DNA, 20 bp, synthetic construct
  source 1..20: mol_type = other DNA
gccttctgacttctttcctt

SEQ ID NO: 1683 - DNA, 20 bp, synthetic construct
  source 1..20: mol_type = other DNA
gccttcagagcaaacacagc

SEQ ID NO: 1684 - DNA, 20 bp, synthetic construct
  source 1..20: mol_type = other DNA
gcctgtatttccctgctggt

SEQ ID NO: 1685 - DNA, 20 bp, synthetic construct
  source 1..20: mol_type = other DNA
gcctgcttagattgaataca

SEQ ID NO: 1686 - DNA, 20 bp, synthetic construct
  source 1..20: mol_type = other DNA
gcctgctaggttttatccaa

SEQ ID NO: 1687 - DNA, 20 bp, synthetic construct
  source 1..20: mol_type = other DNA
gcctgagggctccaccccaa

SEQ ID NO: 1688 - DNA, 21 bp, synthetic construct
  source 1..21: mol_type = other DNA
gcctgaggatgagtgtttctc

SEQ ID NO: 1689 - DNA, 20 bp, synthetic construct
  source 1..20: mol_type = other DNA
gcctgaggatgagtgtttct

SEQ ID NO: 1690 - DNA, 21 bp, synthetic construct
  source 1..21: mol_type = other DNA
gcctctcactctgggatcttg

SEQ ID NO: 1691 - DNA, 20 bp, synthetic construct
  source 1..20: mol_type = other DNA
gcctcgtcgtctaacaacag

SEQ ID NO: 1692 - DNA, 20 bp, synthetic construct
  source 1..20: mol_type = other DNA
gcctccaccaatcgccagac

SEQ ID NO: 1693 - DNA, 20 bp, synthetic construct
  source 1..20: mol_type = other DNA
gcctcagctctgtatcggga

SEQ ID NO: 1694 - DNA, 21 bp, synthetic construct
  source 1..21: mol_type = other DNA
gcctcagcccgtttctcctgg

SEQ ID NO: 1695 - DNA, 20 bp, synthetic construct
  source 1..20: mol_type = other DNA
gcctacagcctcctagtaca

SEQ ID NO: 1696 - DNA, 21 bp, synthetic construct
  source 1..21: mol_type = other DNA
gcctacaaactgttcacattt

SEQ ID NO: 1697 - DNA, 21 bp, synthetic construct
  source 1..21: mol_type = other DNA
gcctaaagttcaggcaactct

SEQ ID NO: 1698 - DNA, 21 bp, synthetic construct
  source 1..21: mol_type = other DNA
gccgttgccgggcaacggggt

SEQ ID NO: 1699 - DNA, 20 bp, synthetic construct
  source 1..20: mol_type = other DNA
gccgttgccgggcaacgggg

SEQ ID NO: 1700 - DNA, 20 bp, synthetic construct
  source 1..20: mol_type = other DNA
gccgttccgaccgaccacgg

SEQ ID NO: 1701 - DNA, 21 bp, synthetic construct
  source 1..21: mol_type = other DNA
gccgggcaacggggtaaaggt

SEQ ID NO: 1702 - DNA, 20 bp, synthetic construct
  source 1..20: mol_type = other DNA
gccgcttgttttgctcgcag

SEQ ID NO: 1703 - DNA, 20 bp, synthetic construct
  source 1..20: mol_type = other DNA
gccgcagacacatccagcga

SEQ ID NO: 1704 - DNA, 20 bp, synthetic construct
  source 1..20: mol_type = other DNA
gccgacgggacgtaaacaaa

SEQ ID NO: 1705 - DNA, 20 bp, synthetic construct
  source 1..20: mol_type = other DNA
gcccgtttgtcctctaattc

SEQ ID NO: 1706 - DNA, 20 bp, synthetic construct
  source 1..20: mol_type = other DNA
gccccgtggtcggtcggaac

SEQ ID NO: 1707 - DNA, 20 bp, synthetic construct
  source 1..20: mol_type = other DNA
gcccatgaccaagccccagc

SEQ ID NO: 1708 - DNA, 20 bp, synthetic construct
  source 1..20: mol_type = other DNA
gcccacttacagttaatgag

SEQ ID NO: 1709 - DNA, 20 bp, synthetic construct
  source 1..20: mol_type = other DNA
gcccaaggtcttacataaga

SEQ ID NO: 1710 - DNA, 20 bp, synthetic construct
  source 1..20: mol_type = other DNA
gccatttgttcagtggttcg

SEQ ID NO: 1711 - DNA, 20 bp, synthetic construct
  source 1..20: mol_type = other DNA
gccagtgggggttgcgtcag

SEQ ID NO: 1712 - DNA, 21 bp, synthetic construct
  source 1..21: mol_type = other DNA
gccaggtgtccttgttgggat

SEQ ID NO: 1713 - DNA, 20 bp, synthetic construct
  source 1..20: mol_type = other DNA
gccagacgccaacaaggtag

SEQ ID NO: 1714 - DNA, 20 bp, synthetic construct
  source 1..20: mol_type = other DNA
gccacccaaggcacagcttg

SEQ ID NO: 1715 - DNA, 20 bp, synthetic construct
  source 1..20: mol_type = other DNA
gccaccagcagggaaataca

SEQ ID NO: 1716 - DNA, 20 bp, synthetic construct
  source 1..20: mol_type = other DNA
gccacaagaacacatcatac

SEQ ID NO: 1717 - DNA, 20 bp, synthetic construct
  source 1..20: mol_type = other DNA
gccaagtctgtacagcatct

SEQ ID NO: 1718 - DNA, 20 bp, synthetic construct
  source 1..20: mol_type = other DNA
gccaacaaggtaggagctgg

SEQ ID NO: 1719 - DNA, 20 bp, synthetic construct
  source 1..20: mol_type = other DNA
gcatttggtggtctataagc

SEQ ID NO: 1720 - DNA, 20 bp, synthetic construct
  source 1..20: mol_type = other DNA
gcatgtattcaatctaagca

SEQ ID NO: 1721 - DNA, 21 bp, synthetic construct
  source 1..21: mol_type = other DNA
gcatggacatcgacccttata

SEQ ID NO: 1722 - DNA, 20 bp, synthetic construct
  source 1..20: mol_type = other DNA
gcatggacatcgacccttat

SEQ ID NO: 1723 - DNA, 20 bp, synthetic construct
  source 1..20: mol_type = other DNA
gcatctagagacctagtagt

SEQ ID NO: 1724 - DNA, 21 bp, synthetic construct
  source 1..21: mol_type = other DNA
gcatagcagcaggatgaagag

SEQ ID NO: 1725 - DNA, 20 bp, synthetic construct
  source 1..20: mol_type = other DNA
gcatagcagcaggatgaaga

SEQ ID NO: 1726 - DNA, 20 bp, synthetic construct
  source 1..20: mol_type = other DNA
gcatacaagggcattaacgc

SEQ ID NO: 1727 - DNA, 20 bp, synthetic construct
  source 1..20: mol_type = other DNA
gcataaattggtctgcgcac

SEQ ID NO: 1728 - DNA, 20 bp, synthetic construct
  source 1..20: mol_type = other DNA
gcagtatggatcggcagagg

SEQ ID NO: 1729 - DNA, 21 bp, synthetic construct
  source 1..21: mol_type = other DNA
gcagtagtcatgcaggttcgg

SEQ ID NO: 1730 - DNA, 21 bp, synthetic construct
  source 1..21: mol_type = other DNA
gcaggttcggcatggtcccgt

SEQ ID NO: 1731 - DNA, 20 bp, synthetic construct
  source 1..20: mol_type = other DNA
gcaggttcggcatggtcccg

SEQ ID NO: 1732 - DNA, 20 bp, synthetic construct
  source 1..20: mol_type = other DNA
gcagggtccccaatcctcga

SEQ ID NO: 1733 - DNA, 20 bp, synthetic construct
  source 1..20: mol_type = other DNA
gcaggctttcactttctcgc

SEQ ID NO: 1734 - DNA, 20 bp, synthetic construct
  source 1..20: mol_type = other DNA
gcaggatccagttggcagca

SEQ ID NO: 1735 - DNA, 20 bp, synthetic construct
  source 1..20: mol_type = other DNA
gcaggataaccacattgtgt

SEQ ID NO: 1736 - DNA, 20 bp, synthetic construct
  source 1..20: mol_type = other DNA
gcaggaggcggatttgctgg

SEQ ID NO: 1737 - DNA, 20 bp, synthetic construct
  source 1..20: mol_type = other DNA
gcagcacagcctagcagcca

SEQ ID NO: 1738 - DNA, 21 bp, synthetic construct
  source 1..21: mol_type = other DNA
gcagatgagaaggcacagacg

SEQ ID NO: 1739 - DNA, 20 bp, synthetic construct
  source 1..20: mol_type = other DNA
gcagatgagaaggcacagac

SEQ ID NO: 1740 - DNA, 21 bp, synthetic construct
  source 1..21: mol_type = other DNA
gcagaggtgaagcgaagtgca

SEQ ID NO: 1741 - DNA, 20 bp, synthetic construct
  source 1..20: mol_type = other DNA
gcagaggtgaaaaagttgca

SEQ ID NO: 1742 - DNA, 20 bp, synthetic construct
  source 1..20: mol_type = other DNA
gcagacggagaaggggacga

SEQ ID NO: 1743 - DNA, 20 bp, synthetic construct
  source 1..20: mol_type = other DNA
gcagaccaatttatgcctac

SEQ ID NO: 1744 - DNA, 20 bp, synthetic construct
  source 1..20: mol_type = other DNA
gcagacacatccagcgataa

SEQ ID NO: 1745 - DNA, 20 bp, synthetic construct
  source 1..20: mol_type = other DNA
gcagaagatctcaatctcgg

SEQ ID NO: 1746 - DNA, 20 bp, synthetic construct
  source 1..20: mol_type = other DNA
gcactcctccagcttataga

SEQ ID NO: 1747 - DNA, 20 bp, synthetic construct
  source 1..20: mol_type = other DNA
gcactagtaaactgagccag

SEQ ID NO: 1748 - DNA, 20 bp, synthetic construct
  source 1..20: mol_type = other DNA
gcacgggaccatgccgaacc

SEQ ID NO: 1749 - DNA, 20 bp, synthetic construct
  source 1..20: mol_type = other DNA
gcacggaggccttttggggt

SEQ ID NO: 1750 - DNA, 20 bp, synthetic construct
  source 1..20: mol_type = other DNA
gcacagcttggaggcttgaa

SEQ ID NO: 1751 - DNA, 21 bp, synthetic construct
  source 1..21: mol_type = other DNA
gcacagcctagcagccatgga

SEQ ID NO: 1752 - DNA, 20 bp, synthetic construct
  source 1..20: mol_type = other DNA
gcacagacggggagtccgcg

SEQ ID NO: 1753 - DNA, 20 bp, synthetic construct
  source 1..20: mol_type = other DNA
gcacagacctggccgttgcc

SEQ ID NO: 1754 - DNA, 20 bp, synthetic construct
  source 1..20: mol_type = other DNA
gcacacggtccggcagatga

SEQ ID NO: 1755 - DNA, 20 bp, synthetic construct
  source 1..20: mol_type = other DNA
gcaatttccgtccgaaggtt

SEQ ID NO: 1756 - DNA, 20 bp, synthetic construct
  source 1..20: mol_type = other DNA
gcaatgtcaacgaccgacct

SEQ ID NO: 1757 - DNA, 20 bp, synthetic construct
  source 1..20: mol_type = other DNA
gcaactttttcacctctgcc

SEQ ID NO: 1758 - DNA, 20 bp, synthetic construct
  source 1..20: mol_type = other DNA
gcaacggccaggtctgtgcc

SEQ ID NO: 1759 - DNA, 20 bp, synthetic construct
  source 1..20: mol_type = other DNA
gcaacataccttgatagtcc

SEQ ID NO: 1760 - DNA, 20 bp, synthetic construct
  source 1..20: mol_type = other DNA
gcaacaggagggatacatag

SEQ ID NO: 1761 - DNA, 21 bp, synthetic construct
  source 1..21: mol_type = other DNA
gcaaatccgcctcctgcctcc

SEQ ID NO: 1762 - DNA, 20 bp, synthetic construct
  source 1..20: mol_type = other DNA
gcaaatccagattgggactt

SEQ ID NO: 1763 - DNA, 20 bp, synthetic construct
  source 1..20: mol_type = other DNA
gcaaatatacatcgtatcca

SEQ ID NO: 1764 - DNA, 20 bp, synthetic construct
  source 1..20: mol_type = other DNA
gcaaagtttgtagtatgccc

SEQ ID NO: 1765 - DNA, 21 bp, synthetic construct
  source 1..21: mol_type = other DNA
gcaaagaattgcttgcctgag

SEQ ID NO: 1766 - DNA, 20 bp, synthetic construct
  source 1..20: mol_type = other DNA
gcaaacattatcgggactga

SEQ ID NO: 1767 - DNA, 20 bp, synthetic construct
  source 1..20: mol_type = other DNA
gcaaacacttggcacagacc

SEQ ID NO: 1768 - DNA, 20 bp, synthetic construct
  source 1..20: mol_type = other DNA
gatttgctgtgtttgctctg

SEQ ID NO: 1769 - DNA, 20 bp, synthetic construct
  source 1..20: mol_type = other DNA
gattggtggaggcaggaggc

SEQ ID NO: 1770 - DNA, 20 bp, synthetic construct
  source 1..20: mol_type = other DNA
gattgggacttcaatcccaa

SEQ ID NO: 1771 - DNA, 20 bp, synthetic construct
  source 1..20: mol_type = other DNA
gattggaggttggggactgc

SEQ ID NO: 1772 - DNA, 20 bp, synthetic construct
  source 1..20: mol_type = other DNA
gattgctggtggaaagattc

SEQ ID NO: 1773 - DNA, 21 bp, synthetic construct
  source 1..21: mol_type = other DNA
gattgagatcttctgcgacgc

SEQ ID NO: 1774 - DNA, 20 bp, synthetic construct
  source 1..20: mol_type = other DNA
gattgagatcttctgcgacg

SEQ ID NO: 1775 - DNA, 20 bp, synthetic construct
  source 1..20: mol_type = other DNA
gattgagaccttcgtctgcg

SEQ ID NO: 1776 - DNA, 21 bp, synthetic construct
  source 1..21: mol_type = other DNA
gattgacgataagggagaggc

SEQ ID NO: 1777 - DNA, 20 bp, synthetic construct
  source 1..20: mol_type = other DNA
gattgacgataagggagagg

SEQ ID NO: 1778 - DNA, 20 bp, synthetic construct
  source 1..20: mol_type = other DNA
gattgaatacatgcatacaa

SEQ ID NO: 1779 - DNA, 20 bp, synthetic construct
  source 1..20: mol_type = other DNA
gattcagcgccgacgggacg

SEQ ID NO: 1780 - DNA, 20 bp, synthetic construct
  source 1..20: mol_type = other DNA
gattaactagatgttctgga

SEQ ID NO: 1781 - DNA, 20 bp, synthetic construct
  source 1..20: mol_type = other DNA
gattaaaggtctttgtacta

SEQ ID NO: 1782 - DNA, 21 bp, synthetic construct
  source 1..21: mol_type = other DNA
gattaaagacaggtacagtag

SEQ ID NO: 1783 - DNA, 20 bp, synthetic construct
  source 1..20: mol_type = other DNA
gattaaagacaggtacagta

SEQ ID NO: 1784 - DNA, 20 bp, synthetic construct
  source 1..20: mol_type = other DNA
gatgttctccatgttcagcg

SEQ ID NO: 1785 - DNA, 20 bp, synthetic construct
  source 1..20: mol_type = other DNA
gatgtgatgttctccatgtt

SEQ ID NO: 1786 - DNA, 20 bp, synthetic construct
  source 1..20: mol_type = other DNA
gatggcccatgaccaagccc

SEQ ID NO: 1787 - DNA, 20 bp, synthetic construct
  source 1..20: mol_type = other DNA
gatgattaggcagaggtgaa

SEQ ID NO: 1788 - DNA, 20 bp, synthetic construct
  source 1..20: mol_type = other DNA
gatgatgtggtattgggggc

SEQ ID NO: 1789 - DNA, 20 bp, synthetic construct
  source 1..20: mol_type = other DNA
gatgagtgtttctcaaaggt

SEQ ID NO: 1790 - DNA, 20 bp, synthetic construct
  source 1..20: mol_type = other DNA
gatgaggcatagcagcagga

SEQ ID NO: 1791 - DNA, 20 bp, synthetic construct
  source 1..20: mol_type = other DNA
gatgagaaggcacagacggg

SEQ ID NO: 1792 - DNA, 20 bp, synthetic construct
  source 1..20: mol_type = other DNA
gatcttgcagagtttggtga

SEQ ID NO: 1793 - DNA, 20 bp, synthetic construct
  source 1..20: mol_type = other DNA
gatcttctagataccgcctc

SEQ ID NO: 1794 - DNA, 20 bp, synthetic construct
  source 1..20: mol_type = other DNA
gatctcgtactgaaggaaag

SEQ ID NO: 1795 - DNA, 20 bp, synthetic construct
  source 1..20: mol_type = other DNA
gatctcaatctcgggaacct

SEQ ID NO: 1796 - DNA, 20 bp, synthetic construct
  source 1..20: mol_type = other DNA
gatcggcagaggagccgaaa

SEQ ID NO: 1797 - DNA, 20 bp, synthetic construct
  source 1..20: mol_type = other DNA
gatcctcaaccaccagcacg

SEQ ID NO: 1798 - DNA, 20 bp, synthetic construct
  source 1..20: mol_type = other DNA
gatccatactgcggaactcc

SEQ ID NO: 1799 - DNA, 20 bp, synthetic construct
  source 1..20: mol_type = other DNA
gatccaactggtggtcggga

SEQ ID NO: 1800 - DNA, 20 bp, synthetic construct
  source 1..20: mol_type = other DNA
gatagtccagaagaaccaac

SEQ ID NO: 1801 - DNA, 20 bp, synthetic construct
  source 1..20: mol_type = other DNA
gataggataggggcatttgg

SEQ ID NO: 1802 - DNA, 20 bp, synthetic construct
  source 1..20: mol_type = other DNA
gatacgatgtatatttgcgg

SEQ ID NO: 1803 - DNA, 20 bp, synthetic construct
  source 1..20: mol_type = other DNA
gataatgtttgctccagacc

SEQ ID NO: 1804 - DNA, 20 bp, synthetic construct
  source 1..20: mol_type = other DNA
gataagggagaggcagtagt

SEQ ID NO: 1805 - DNA, 20 bp, synthetic construct
  source 1..20: mol_type = other DNA
gataaccacattgtgtaaat

SEQ ID NO: 1806 - DNA, 20 bp, synthetic construct
  source 1..20: mol_type = other DNA
gagtttggtgaaaggttgtg

SEQ ID NO: 1807 - DNA, 20 bp, synthetic construct
  source 1..20: mol_type = other DNA
gagtgcgaatccacactccg

SEQ ID NO: 1808 - DNA, 21 bp, synthetic construct
  source 1..21: mol_type = other DNA
gagtccctttttaccgctgtt

SEQ ID NO: 1809 - DNA, 20 bp, synthetic construct
  source 1..20: mol_type = other DNA
gagtcccaagcgaccccgag

SEQ ID NO: 1810 - DNA, 21 bp, synthetic construct
  source 1..21: mol_type = other DNA
gagtccaaggaatactaacat

SEQ ID NO: 1811 - DNA, 20 bp, synthetic construct
  source 1..20: mol_type = other DNA
gagtcattagttccccccag

SEQ ID NO: 1812 - DNA, 20 bp, synthetic construct
  source 1..20: mol_type = other DNA
gagtaactccacagtagctc

SEQ ID NO: 1813 - DNA, 20 bp, synthetic construct
  source 1..20: mol_type = other DNA
gaggtgaagcgaagtgcaca

SEQ ID NO: 1814 - DNA, 21 bp, synthetic construct
  source 1..21: mol_type = other DNA
gaggtgaaaaagttgcatggt

SEQ ID NO: 1815 - DNA, 20 bp, synthetic construct
  source 1..20: mol_type = other DNA
gaggtgaaaaagttgcatgg

SEQ ID NO: 1816 - DNA, 20 bp, synthetic construct
  source 1..20: mol_type = other DNA
gagggagttcttcttctagg

SEQ ID NO: 1817 - DNA, 20 bp, synthetic construct
  source 1..20: mol_type = other DNA
gaggcttgaacagtaggaca

SEQ ID NO: 1818 - DNA, 20 bp, synthetic construct
  source 1..20: mol_type = other DNA
gaggcatagcagcaggatga

SEQ ID NO: 1819 - DNA, 20 bp, synthetic construct
  source 1..20: mol_type = other DNA
gaggcaggtcccctagaaga

SEQ ID NO: 1820 - DNA, 20 bp, synthetic construct
  source 1..20: mol_type = other DNA
gaggcaggaggcggatttgc

SEQ ID NO: 1821 - DNA, 20 bp, synthetic construct
  source 1..20: mol_type = other DNA
gaggattggggaccctgcgc

SEQ ID NO: 1822 - DNA, 20 bp, synthetic construct
  source 1..20: mol_type = other DNA
gaggattcttgtcaacaaga

SEQ ID NO: 1823 - DNA, 20 bp, synthetic construct
  source 1..20: mol_type = other DNA
gaggagttgggggaggagat

SEQ ID NO: 1824 - DNA, 20 bp, synthetic construct
  source 1..20: mol_type = other DNA
gaggagccgaaaaggttcca

SEQ ID NO: 1825 - DNA, 20 bp, synthetic construct
  source 1..20: mol_type = other DNA
gaggactcttggactctctg

SEQ ID NO: 1826 - DNA, 20 bp, synthetic construct
  source 1..20: mol_type = other DNA
gaggacaggaggttggtgag

SEQ ID NO: 1827 - DNA, 21 bp, synthetic construct
  source 1..21: mol_type = other DNA
gaggacaacagagttatcagt

SEQ ID NO: 1828 - DNA, 21 bp, synthetic construct
  source 1..21: mol_type = other DNA
gaggacaaacgggcaacatac

SEQ ID NO: 1829 - DNA, 20 bp, synthetic construct
  source 1..20: mol_type = other DNA
gagctgaggcggtatctaga

SEQ ID NO: 1830 - DNA, 20 bp, synthetic construct
  source 1..20: mol_type = other DNA
gagcctgagggctccacccc

SEQ ID NO: 1831 - DNA, 20 bp, synthetic construct
  source 1..20: mol_type = other DNA
gagccaggagaaacgggctg

SEQ ID NO: 1832 - DNA, 20 bp, synthetic construct
  source 1..20: mol_type = other DNA
gagccaccagcagggaaata

SEQ ID NO: 1833 - DNA, 20 bp, synthetic construct
  source 1..20: mol_type = other DNA
gagcagtagtcatgcaggtt

SEQ ID NO: 1834 - DNA, 20 bp, synthetic construct
  source 1..20: mol_type = other DNA
gagattgagatcttctgcga

SEQ ID NO: 1835 - DNA, 21 bp, synthetic construct
  source 1..21: mol_type = other DNA
gagatgattaggcagaggtga

SEQ ID NO: 1836 - DNA, 20 bp, synthetic construct
  source 1..20: mol_type = other DNA
gagatgattaggcagaggtg

SEQ ID NO: 1837 - DNA, 20 bp, synthetic construct
  source 1..20: mol_type = other DNA
gagagtcccaagcgaccccg

SEQ ID NO: 1838 - DNA, 21 bp, synthetic construct
  source 1..21: mol_type = other DNA
gagagtaactccacagtagct

SEQ ID NO: 1839 - DNA, 20 bp, synthetic construct
  source 1..20: mol_type = other DNA
gagaggcagtagtcggaaca

SEQ ID NO: 1840 - DNA, 20 bp, synthetic construct
  source 1..20: mol_type = other DNA
gagagagtcccaagcgaccc

SEQ ID NO: 1841 - DNA, 20 bp, synthetic construct
  source 1..20: mol_type = other DNA
gagaccttcgtctgcgaggc

SEQ ID NO: 1842 - DNA, 20 bp, synthetic construct
  source 1..20: mol_type = other DNA
gagaagattgacgataaggg

SEQ ID NO: 1843 - DNA, 20 bp, synthetic construct
  source 1..20: mol_type = other DNA
gagaaagtgaaagcctgctt

SEQ ID NO: 1844 - DNA, 20 bp, synthetic construct
  source 1..20: mol_type = other DNA
gacttctttccttcagtacg

SEQ ID NO: 1845 - DNA, 20 bp, synthetic construct
  source 1..20: mol_type = other DNA
gactgtttgtttaaagactg

SEQ ID NO: 1846 - DNA, 20 bp, synthetic construct
  source 1..20: mol_type = other DNA
gactgggaggagttggggga

SEQ ID NO: 1847 - DNA, 20 bp, synthetic construct
  source 1..20: mol_type = other DNA
gactctaaggcttcccgata

SEQ ID NO: 1848 - DNA, 20 bp, synthetic construct
  source 1..20: mol_type = other DNA
gactcgtggtggacttctct

SEQ ID NO: 1849 - DNA, 21 bp, synthetic construct
  source 1..21: mol_type = other DNA
gactactgcctctcccttatc

SEQ ID NO: 1850 - DNA, 20 bp, synthetic construct
  source 1..20: mol_type = other DNA
gacgtaaacaaaggacgtcc

SEQ ID NO: 1851 - DNA, 20 bp, synthetic construct
  source 1..20: mol_type = other DNA
gacggggagtccgcgtaaag

SEQ ID NO: 1852 - DNA, 20 bp, synthetic construct
  source 1..20: mol_type = other DNA
gacgcaacccccactggctg

SEQ ID NO: 1853 - DNA, 20 bp, synthetic construct
  source 1..20: mol_type = other DNA
gaccttgggcaacattcggt

SEQ ID NO: 1854 - DNA, 20 bp, synthetic construct
  source 1..20: mol_type = other DNA
gaccttgaggcatacttcaa

SEQ ID NO: 1855 - DNA, 20 bp, synthetic construct
  source 1..20: mol_type = other DNA
gaccttcgtctgcgaggcga

SEQ ID NO: 1856 - DNA, 21 bp, synthetic construct
  source 1..21: mol_type = other DNA
gacctggccgttgccgggcaa

SEQ ID NO: 1857 - DNA, 20 bp, synthetic construct
  source 1..20: mol_type = other DNA
gacctgctgcgagcaaaaca

SEQ ID NO: 1858 - DNA, 20 bp, synthetic construct
  source 1..20: mol_type = other DNA
gacctagtagtcagttatgt

SEQ ID NO: 1859 - DNA, 20 bp, synthetic construct
  source 1..20: mol_type = other DNA
gacccttctcggggtcgctt

SEQ ID NO: 1860 - DNA, 20 bp, synthetic construct
  source 1..20: mol_type = other DNA
gacccttataaagaatttgg

SEQ ID NO: 1861 - DNA, 20 bp, synthetic construct
  source 1..20: mol_type = other DNA
gaccctgcgctgaacatgga

SEQ ID NO: 1862 - DNA, 21 bp, synthetic construct
  source 1..21: mol_type = other DNA
gaccccttctcgtgttacagg

SEQ ID NO: 1863 - DNA, 21 bp, synthetic construct
  source 1..21: mol_type = other DNA
gaccccgagaagggtcgtccg

SEQ ID NO: 1864 - DNA, 20 bp, synthetic construct
  source 1..20: mol_type = other DNA
gaccccgagaagggtcgtcc

SEQ ID NO: 1865 - DNA, 20 bp, synthetic construct
  source 1..20: mol_type = other DNA
gaccaccgtgaacgcccacc

SEQ ID NO: 1866 - DNA, 20 bp, synthetic construct
  source 1..20: mol_type = other DNA
gaccaagccccagccagtgg

SEQ ID NO: 1867 - DNA, 20 bp, synthetic construct
  source 1..20: mol_type = other DNA
gacatgaacaagagatgatt

SEQ ID NO: 1868 - DNA, 20 bp, synthetic construct
  source 1..20: mol_type = other DNA
gacatactttccaatcaata

SEQ ID NO: 1869 - DNA, 20 bp, synthetic construct
  source 1..20: mol_type = other DNA
gacataacccataaaattca

SEQ ID NO: 1870 - DNA, 20 bp, synthetic construct
  source 1..20: mol_type = other DNA
gacaggtacagtagaagaat

SEQ ID NO: 1871 - DNA, 20 bp, synthetic construct
  source 1..20: mol_type = other DNA
gacaggaaggcagcctaccc

SEQ ID NO: 1872 - DNA, 20 bp, synthetic construct
  source 1..20: mol_type = other DNA
gacactatttacacactcta

SEQ ID NO: 1873 - DNA, 20 bp, synthetic construct
  source 1..20: mol_type = other DNA
gacacctggccagacgccaa

SEQ ID NO: 1874 - DNA, 21 bp, synthetic construct
  source 1..21: mol_type = other DNA
gacacacggtagttcccccta

SEQ ID NO: 1875 - DNA, 20 bp, synthetic construct
  source 1..20: mol_type = other DNA
gacacacggtagttccccct

SEQ ID NO: 1876 - DNA, 20 bp, synthetic construct
  source 1..20: mol_type = other DNA
gacaagaatcctcacaatac

SEQ ID NO: 1877 - DNA, 20 bp, synthetic construct
  source 1..20: mol_type = other DNA
gacaagaaatgtgaaaccac

SEQ ID NO: 1878 - DNA, 21 bp, synthetic construct
  source 1..21: mol_type = other DNA
gacaacagagttatcagtccc

SEQ ID NO: 1879 - DNA, 20 bp, synthetic construct
  source 1..20: mol_type = other DNA
gacaacagagttatcagtcc

SEQ ID NO: 1880 - DNA, 21 bp, synthetic construct
  source 1..21: mol_type = other DNA
gacaaacgggcaacatacctt

SEQ ID NO: 1881 - DNA, 20 bp, synthetic construct
  source 1..20: mol_type = other DNA
gacaaacgggcaacatacct

SEQ ID NO: 1882 - DNA, 20 bp, synthetic construct
  source 1..20: mol_type = other DNA
gacaaaagaaaattggtaac

SEQ ID NO: 1883 - DNA, 21 bp, synthetic construct
  source 1..21: mol_type = other DNA
gaattgcttgcctgagtgcag

SEQ ID NO: 1884 - DNA, 20 bp, synthetic construct
  source 1..20: mol_type = other DNA
gaatcccagaggattgctgg

SEQ ID NO: 1885 - DNA, 20 bp, synthetic construct
  source 1..20: mol_type = other DNA
gaatatggtgacccacaaaa

SEQ ID NO: 1886 - DNA, 21 bp, synthetic construct
  source 1..21: mol_type = other DNA
gaatactaacattgaggttcc

SEQ ID NO: 1887 - DNA, 20 bp, synthetic construct
  source 1..20: mol_type = other DNA
gaagttatgggtccttgcca

SEQ ID NO: 1888 - DNA, 20 bp, synthetic construct
  source 1..20: mol_type = other DNA
gaagtcagaaggcaaaaacg

SEQ ID NO: 1889 - DNA, 20 bp, synthetic construct
  source 1..20: mol_type = other DNA
gaaggtttggtacagcaaca

SEQ ID NO: 1890 - DNA, 20 bp, synthetic construct
  source 1..20: mol_type = other DNA
gaaggtctcaatcgccgcgt

SEQ ID NO: 1891 - DNA, 20 bp, synthetic construct
  source 1..20: mol_type = other DNA
gaagggtcgtccgcaggatt

SEQ ID NO: 1892 - DNA, 20 bp, synthetic construct
  source 1..20: mol_type = other DNA
gaaggggacgagagagtccc

SEQ ID NO: 1893 - DNA, 20 bp, synthetic construct
  source 1..20: mol_type = other DNA
gaaggcgggtatattatata

SEQ ID NO: 1894 - DNA, 20 bp, synthetic construct
  source 1..20: mol_type = other DNA
gaaggcacagacggggagtc

SEQ ID NO: 1895 - DNA, 20 bp, synthetic construct
  source 1..20: mol_type = other DNA
gaaggaaagaagtcagaagg

SEQ ID NO: 1896 - DNA, 20 bp, synthetic construct
  source 1..20: mol_type = other DNA
gaagcgaagtgcacacggtc

SEQ ID NO: 1897 - DNA, 21 bp, synthetic construct
  source 1..21: mol_type = other DNA
gaagattgacgataagggaga

SEQ ID NO: 1898 - DNA, 20 bp, synthetic construct
  source 1..20: mol_type = other DNA
gaagattgacgataagggag

SEQ ID NO: 1899 - DNA, 20 bp, synthetic construct
  source 1..20: mol_type = other DNA
gaagatgaggcatagcagca

SEQ ID NO: 1900 - DNA, 21 bp, synthetic construct
  source 1..21: mol_type = other DNA
gaagatctcgtactgaaggaa

SEQ ID NO: 1901 - DNA, 20 bp, synthetic construct
  source 1..20: mol_type = other DNA
gaagatctcgtactgaagga

SEQ ID NO: 1902 - DNA, 20 bp, synthetic construct
  source 1..20: mol_type = other DNA
gaagaagaactccctcgcct

SEQ ID NO: 1903 - DNA, 20 bp, synthetic construct
  source 1..20: mol_type = other DNA
gaagaaccaacaagaagatg

SEQ ID NO: 1904 - DNA, 20 bp, synthetic construct
  source 1..20: mol_type = other DNA
gaactggagccaccagcagg

SEQ ID NO: 1905 - DNA, 20 bp, synthetic construct
  source 1..20: mol_type = other DNA
gaactcctagccgcttgttt

SEQ ID NO: 1906 - DNA, 20 bp, synthetic construct
  source 1..20: mol_type = other DNA
gaactccctcgcctcgcaga

SEQ ID NO: 1907 - DNA, 20 bp, synthetic construct
  source 1..20: mol_type = other DNA
gaactaccgtgtgtcttggc

SEQ ID NO: 1908 - DNA, 21 bp, synthetic construct
  source 1..21: mol_type = other DNA
gaacgcccaccgaatgttgcc

SEQ ID NO: 1909 - DNA, 20 bp, synthetic construct
  source 1..20: mol_type = other DNA
gaacctttaccccgttgccc

SEQ ID NO: 1910 - DNA, 20 bp, synthetic construct
  source 1..20: mol_type = other DNA
gaacctgcatgactactgct

SEQ ID NO: 1911 - DNA, 20 bp, synthetic construct
  source 1..20: mol_type = other DNA
gaacatggagaacatcacat

SEQ ID NO: 1912 - DNA, 20 bp, synthetic construct
  source 1..20: mol_type = other DNA
gaacatcacatcaggattcc

SEQ ID NO: 1913 - DNA, 20 bp, synthetic construct
  source 1..20: mol_type = other DNA
gaacagtaggacatgaacaa

SEQ ID NO: 1914 - DNA, 20 bp, synthetic construct
  source 1..20: mol_type = other DNA
gaacagggtttactgctcct

SEQ ID NO: 1915 - DNA, 20 bp, synthetic construct
  source 1..20: mol_type = other DNA
gaacacatcatacaaaaaat

SEQ ID NO: 1916 - DNA, 20 bp, synthetic construct
  source 1..20: mol_type = other DNA
gaacaatgctcaggagactc

SEQ ID NO: 1917 - DNA, 20 bp, synthetic construct
  source 1..20: mol_type = other DNA
gaacaagatctacagcatgg

SEQ ID NO: 1918 - DNA, 20 bp, synthetic construct
  source 1..20: mol_type = other DNA
gaacaagagatgattaggca

SEQ ID NO: 1919 - DNA, 20 bp, synthetic construct
  source 1..20: mol_type = other DNA
gaaatacaggcctctcactc

SEQ ID NO: 1920 - DNA, 21 bp, synthetic construct
  source 1..21: mol_type = other DNA
gaaagtgaaagcctgcttaga

SEQ ID NO: 1921 - DNA, 20 bp, synthetic construct
  source 1..20: mol_type = other DNA
gaaagtatgtcaacgaattg

SEQ ID NO: 1922 - DNA, 20 bp, synthetic construct
  source 1..20: mol_type = other DNA
gaaaggccttgtaagttggc

SEQ ID NO: 1923 - DNA, 21 bp, synthetic construct
  source 1..21: mol_type = other DNA
gaaagccctacgaaccactga

SEQ ID NO: 1924 - DNA, 20 bp, synthetic construct
  source 1..20: mol_type = other DNA
gaaagccaaacagtggggga

SEQ ID NO: 1925 - DNA, 21 bp, synthetic construct
  source 1..21: mol_type = other DNA
gaaagacaccaaatactctat

SEQ ID NO: 1926 - DNA, 20 bp, synthetic construct
  source 1..20: mol_type = other DNA
gaaagacaccaaatactcta

SEQ ID NO: 1927 - DNA, 20 bp, synthetic construct
  source 1..20: mol_type = other DNA
gaaacccagcccgaatgctc

SEQ ID NO: 1928 - DNA, 21 bp, synthetic construct
  source 1..21: mol_type = other DNA
gaaacactcatcctcaggcca

SEQ ID NO: 1929 - DNA, 20 bp, synthetic construct
  source 1..20: mol_type = other DNA
gaaaattggtaacagcggta

SEQ ID NO: 1930 - DNA, 21 bp, synthetic construct
  source 1..21: mol_type = other DNA
gaaaattgagagaagtccacc

SEQ ID NO: 1931 - DNA, 21 bp, synthetic construct
  source 1..21: mol_type = other DNA
gaaaagatggtgttttccaat

SEQ ID NO: 1932 - DNA, 20 bp, synthetic construct
  source 1..20: mol_type = other DNA
gaaaagatggtgttttccaa

SEQ ID NO: 1933 - DNA, 20 bp, synthetic construct
  source 1..20: mol_type = other DNA
gaaaaaccccgcctgtaaca

SEQ ID NO: 1934 - DNA, 20 bp, synthetic construct
  source 1..20: mol_type = other DNA
cttttggggtggagccctca

SEQ ID NO: 1935 - DNA, 21 bp, synthetic construct
  source 1..21: mol_type = other DNA
cttttggaagagaaaccgtta

SEQ ID NO: 1936 - DNA, 20 bp, synthetic construct
  source 1..20: mol_type = other DNA
cttttctcattaactgtaag

SEQ ID NO: 1937 - DNA, 20 bp, synthetic construct
  source 1..20: mol_type = other DNA
ctttgtttacgtcccgtcgg

SEQ ID NO: 1938 - DNA, 20 bp, synthetic construct
  source 1..20: mol_type = other DNA
ctttgtactaggaggctgta

SEQ ID NO: 1939 - DNA, 21 bp, synthetic construct
  source 1..21: mol_type = other DNA
ctttggataaaacctagcagg

SEQ ID NO: 1940 - DNA, 20 bp, synthetic construct
  source 1..20: mol_type = other DNA
ctttgagaaacactcatcct

SEQ ID NO: 1941 - DNA, 20 bp, synthetic construct
  source 1..20: mol_type = other DNA
ctttctgtgtaaacaatacc

SEQ ID NO: 1942 - DNA, 20 bp, synthetic construct
  source 1..20: mol_type = other DNA
ctttcggaaaattcctatgg

SEQ ID NO: 1943 - DNA, 20 bp, synthetic construct
  source 1..20: mol_type = other DNA
ctttccaccagcaatcctct

SEQ ID NO: 1944 - DNA, 20 bp, synthetic construct
  source 1..20: mol_type = other DNA
ctttaggcccatattagtgt

SEQ ID NO: 1945 - DNA, 20 bp, synthetic construct
  source 1..20: mol_type = other DNA
ctttaaacaaacagtctttg

SEQ ID NO: 1946 - DNA, 20 bp, synthetic construct
  source 1..20: mol_type = other DNA
cttgttgacaagaatcctca

SEQ ID NO: 1947 - DNA, 20 bp, synthetic construct
  source 1..20: mol_type = other DNA
cttgttcatgtcctactgtt

SEQ ID NO: 1948 - DNA, 20 bp, synthetic construct
  source 1..20: mol_type = other DNA
cttgtctcacttttggaaga

SEQ ID NO: 1949 - DNA, 20 bp, synthetic construct
  source 1..20: mol_type = other DNA
cttgtcaacaagaaaaaccc

SEQ ID NO: 1950 - DNA, 20 bp, synthetic construct
  source 1..20: mol_type = other DNA
cttgtaagttggcgagaaag

SEQ ID NO: 1951 - DNA, 20 bp, synthetic construct
  source 1..20: mol_type = other DNA
cttggtgtaaatgtatatta

SEQ ID NO: 1952 - DNA, 20 bp, synthetic construct
  source 1..20: mol_type = other DNA
cttgggtggctttggggcat

SEQ ID NO: 1953 - DNA, 20 bp, synthetic construct
  source 1..20: mol_type = other DNA
cttggcacagacctggccgt

SEQ ID NO: 1954 - DNA, 20 bp, synthetic construct
  source 1..20: mol_type = other DNA
cttgcctgagtgcagtatgg

SEQ ID NO: 1955 - DNA, 20 bp, synthetic construct
  source 1..20: mol_type = other DNA
cttgaacagtaggacatgaa

SEQ ID NO: 1956 - DNA, 20 bp, synthetic construct
  source 1..20: mol_type = other DNA
cttcttttctcattaactgt

SEQ ID NO: 1957 - DNA, 20 bp, synthetic construct
  source 1..20: mol_type = other DNA
cttctgcgacgcggcgattg

SEQ ID NO: 1958 - DNA, 20 bp, synthetic construct
  source 1..20: mol_type = other DNA
cttcctgtctggcgattggt

SEQ ID NO: 1959 - DNA, 20 bp, synthetic construct
  source 1..20: mol_type = other DNA
cttcctattaacaggcctat

SEQ ID NO: 1960 - DNA, 20 bp, synthetic construct
  source 1..20: mol_type = other DNA
cttccggaaactactgttgt

SEQ ID NO: 1961 - DNA, 20 bp, synthetic construct
  source 1..20: mol_type = other DNA
cttccaatgacataacccat

SEQ ID NO: 1962 - DNA, 20 bp, synthetic construct
  source 1..20: mol_type = other DNA
cttccaaattaacacccacc

SEQ ID NO: 1963 - DNA, 20 bp, synthetic construct
  source 1..20: mol_type = other DNA
cttcacctctgcacgtcgca

SEQ ID NO: 1964 - DNA, 20 bp, synthetic construct
  source 1..20: mol_type = other DNA
cttcaaagactgtttgttta

SEQ ID NO: 1965 - DNA, 20 bp, synthetic construct
  source 1..20: mol_type = other DNA
cttatgagtccaaggaatac

SEQ ID NO: 1966 - DNA, 20 bp, synthetic construct
  source 1..20: mol_type = other DNA
cttatcgtcaatcttctcga

SEQ ID NO: 1967 - DNA, 20 bp, synthetic construct
  source 1..20: mol_type = other DNA
cttatccaatggtaaatatt

SEQ ID NO: 1968 - DNA, 20 bp, synthetic construct
  source 1..20: mol_type = other DNA
cttacagttaatgagaaaag

SEQ ID NO: 1969 - DNA, 21 bp, synthetic construct
  source 1..21: mol_type = other DNA
cttacaaggcctttctgtgta

SEQ ID NO: 1970 - DNA, 20 bp, synthetic construct
  source 1..20: mol_type = other DNA
cttacaaggcctttctgtgt

SEQ ID NO: 1971 - DNA, 20 bp, synthetic construct
  source 1..20: mol_type = other DNA
ctgtttgtttaaagactggg

SEQ ID NO: 1972 - DNA, 20 bp, synthetic construct
  source 1..20: mol_type = other DNA
ctgtttggctttcagttata

SEQ ID NO: 1973 - DNA, 20 bp, synthetic construct
  source 1..20: mol_type = other DNA
ctgttgttagacgacgaggc

SEQ ID NO: 1974 - DNA, 20 bp, synthetic construct
  source 1..20: mol_type = other DNA
ctgttgctgtaccaaacctt

SEQ ID NO: 1975 - DNA, 20 bp, synthetic construct
  source 1..20: mol_type = other DNA
ctgttcaagcctccaagctg

SEQ ID NO: 1976 - DNA, 20 bp, synthetic construct
  source 1..20: mol_type = other DNA
ctgttaataggaagttttct

SEQ ID NO: 1977 - DNA, 20 bp, synthetic construct
  source 1..20: mol_type = other DNA
ctgtgtttgctctgaaggct

SEQ ID NO: 1978 - DNA, 20 bp, synthetic construct
  source 1..20: mol_type = other DNA
ctgtgctgccaactggatcc

SEQ ID NO: 1979 - DNA, 20 bp, synthetic construct
  source 1..20: mol_type = other DNA
ctgtgccttgggtggctttg

SEQ ID NO: 1980 - DNA, 20 bp, synthetic construct
  source 1..20: mol_type = other DNA
ctgtgccaagtgtttgctga

SEQ ID NO: 1981 - DNA, 20 bp, synthetic construct
  source 1..20: mol_type = other DNA
ctgtctttaatcctcattgg

SEQ ID NO: 1982 - DNA, 20 bp, synthetic construct
  source 1..20: mol_type = other DNA
ctgtctggcgattggtggag

SEQ ID NO: 1983 - DNA, 21 bp, synthetic construct
  source 1..21: mol_type = other DNA
ctgtatttccctgctggtggc

SEQ ID NO: 1984 - DNA, 20 bp, synthetic construct
  source 1..20: mol_type = other DNA
ctgtaccaaaccttcggacg

SEQ ID NO: 1985 - DNA, 20 bp, synthetic construct
  source 1..20: mol_type = other DNA
ctgtacagacttggccccca

SEQ ID NO: 1986 - DNA, 20 bp, synthetic construct
  source 1..20: mol_type = other DNA
ctgtaacacgagaaggggtc

SEQ ID NO: 1987 - DNA, 20 bp, synthetic construct
  source 1..20: mol_type = other DNA
ctggtgcgcagaccaattta

SEQ ID NO: 1988 - DNA, 20 bp, synthetic construct
  source 1..20: mol_type = other DNA
ctgggtttcaccccaccgca

SEQ ID NO: 1989 - DNA, 20 bp, synthetic construct
  source 1..20: mol_type = other DNA
ctgggtgggtgttaatttgg

SEQ ID NO: 1990 - DNA, 20 bp, synthetic construct
  source 1..20: mol_type = other DNA
ctggggggaactaatgactc

SEQ ID NO: 1991 - DNA, 20 bp, synthetic construct
  source 1..20: mol_type = other DNA
ctgggaggagttgggggagg

SEQ ID NO: 1992 - DNA, 20 bp, synthetic construct
  source 1..20: mol_type = other DNA
ctggctggggcttggtcatg

SEQ ID NO: 1993 - DNA, 20 bp, synthetic construct
  source 1..20: mol_type = other DNA
ctggcgattggtggaggcag

SEQ ID NO: 1994 - DNA, 20 bp, synthetic construct
  source 1..20: mol_type = other DNA
ctggccgttgccgggcaacg

SEQ ID NO: 1995 - DNA, 20 bp, synthetic construct
  source 1..20: mol_type = other DNA
ctggccaggtgtccttgttg

SEQ ID NO: 1996 - DNA, 20 bp, synthetic construct
  source 1..20: mol_type = other DNA
ctggccagacgccaacaagg

SEQ ID NO: 1997 - DNA, 20 bp, synthetic construct
  source 1..20: mol_type = other DNA
ctggatccaactggtggtcg

SEQ ID NO: 1998 - DNA, 20 bp, synthetic construct
  source 1..20: mol_type = other DNA
ctggaattagaggacaaacg

SEQ ID NO: 1999 - DNA, 20 bp, synthetic construct
  source 1..20: mol_type = other DNA
ctgctggtggctccagttca

SEQ ID NO: 2000 - DNA, 20 bp, synthetic construct
  source 1..20: mol_type = other DNA
ctgctgcgagcaaaacaagc

SEQ ID NO: 2001 - DNA, 21 bp, synthetic construct
  source 1..21: mol_type = other DNA
ctgcgagcaaaacaagcggct

SEQ ID NO: 2002 - DNA, 20 bp, synthetic construct
  source 1..20: mol_type = other DNA
ctgcgagcaaaacaagcggc

SEQ ID NO: 2003 - DNA, 21 bp, synthetic construct
  source 1..21: mol_type = other DNA
ctgcgaattttggccaagaca

SEQ ID NO: 2004 - DNA, 20 bp, synthetic construct
  source 1..20: mol_type = other DNA
ctgccttcctgtctggcgat

SEQ ID NO: 2005 - DNA, 20 bp, synthetic construct
  source 1..20: mol_type = other DNA
ctgcctccaccaatcgccag

SEQ ID NO: 2006 - DNA, 20 bp, synthetic construct
  source 1..20: mol_type = other DNA
ctgccgttccgaccgaccac

SEQ ID NO: 2007 - DNA, 20 bp, synthetic construct
  source 1..20: mol_type = other DNA
ctgccggaccgtgtgcactt

SEQ ID NO: 2008 - DNA, 20 bp, synthetic construct
  source 1..20: mol_type = other DNA
ctgcatgactactgctcaag

SEQ ID NO: 2009 - DNA, 20 bp, synthetic construct
  source 1..20: mol_type = other DNA
ctgcaagatcccagagtgag

SEQ ID NO: 2010 - DNA, 20 bp, synthetic construct
  source 1..20: mol_type = other DNA
ctgagtgcagtatggtgagg

SEQ ID NO: 2011 - DNA, 20 bp, synthetic construct
  source 1..20: mol_type = other DNA
ctgagggctccaccccaaaa

SEQ ID NO: 2012 - DNA, 20 bp, synthetic construct
  source 1..20: mol_type = other DNA
ctgaggatgagtgtttctca

SEQ ID NO: 2013 - DNA, 20 bp, synthetic construct
  source 1..20: mol_type = other DNA
ctgacttctttccttcagta

SEQ ID NO: 2014 - DNA, 20 bp, synthetic construct
  source 1..20: mol_type = other DNA
ctgactactaggtctctaga

SEQ ID NO: 2015 - DNA, 20 bp, synthetic construct
  source 1..20: mol_type = other DNA
ctgacgcaacccccactggc

SEQ ID NO: 2016 - DNA, 20 bp, synthetic construct
  source 1..20: mol_type = other DNA
ctgaaggaaagaagtcagaa

SEQ ID NO: 2017 - DNA, 21 bp, synthetic construct
  source 1..21: mol_type = other DNA
ctgaactggagccaccagcag

SEQ ID NO: 2018 - DNA, 20 bp, synthetic construct
  source 1..20: mol_type = other DNA
ctgaactggagccaccagca

SEQ ID NO: 2019 - DNA, 20 bp, synthetic construct
  source 1..20: mol_type = other DNA
ctgaaagccaaacagtgggg

SEQ ID NO: 2020 - DNA, 20 bp, synthetic construct
  source 1..20: mol_type = other DNA
ctctttgttttgttagggtt

SEQ ID NO: 2021 - DNA, 20 bp, synthetic construct
  source 1..20: mol_type = other DNA
ctcttccaaaagtgagacaa

SEQ ID NO: 2022 - DNA, 20 bp, synthetic construct
  source 1..20: mol_type = other DNA
ctcttatgtaagaccttggg

SEQ ID NO: 2023 - DNA, 20 bp, synthetic construct
  source 1..20: mol_type = other DNA
ctctgtatcgggaagcctta

SEQ ID NO: 2024 - DNA, 21 bp, synthetic construct
  source 1..21: mol_type = other DNA
ctctgggattctttcccgacc

SEQ ID NO: 2025 - DNA, 20 bp, synthetic construct
  source 1..20: mol_type = other DNA
ctctgggatcttgcagagtt

SEQ ID NO: 2026 - DNA, 20 bp, synthetic construct
  source 1..20: mol_type = other DNA
ctctgccgatccatactgcg

SEQ ID NO: 2027 - DNA, 20 bp, synthetic construct
  source 1..20: mol_type = other DNA
ctctgcaagatcccagagtg

SEQ ID NO: 2028 - DNA, 21 bp, synthetic construct
  source 1..21: mol_type = other DNA
ctctgaaggctggatccaact

SEQ ID NO: 2029 - DNA, 20 bp, synthetic construct
  source 1..20: mol_type = other DNA
ctctgaaggctggatccaac

SEQ ID NO: 2030 - DNA, 20 bp, synthetic construct
  source 1..20: mol_type = other DNA
ctctctgcaatgtcaacgac

SEQ ID NO: 2031 - DNA, 20 bp, synthetic construct
  source 1..20: mol_type = other DNA
ctctcgtccccttctccgtc

SEQ ID NO: 2032 - DNA, 20 bp, synthetic construct
  source 1..20: mol_type = other DNA
ctctcactctgggatcttgc

SEQ ID NO: 2033 - DNA, 21 bp, synthetic construct
  source 1..21: mol_type = other DNA
ctctataacggtttctcttcc

SEQ ID NO: 2034 - DNA, 20 bp, synthetic construct
  source 1..20: mol_type = other DNA
ctctataacggtttctcttc

SEQ ID NO: 2035 - DNA, 20 bp, synthetic construct
  source 1..20: mol_type = other DNA
ctctagatgctggatcttcc

SEQ ID NO: 2036 - DNA, 20 bp, synthetic construct
  source 1..20: mol_type = other DNA
ctctaaggcttcccgataca

SEQ ID NO: 2037 - DNA, 20 bp, synthetic construct
  source 1..20: mol_type = other DNA
ctcgaggattggggaccctg

SEQ ID NO: 2038 - DNA, 20 bp, synthetic construct
  source 1..20: mol_type = other DNA
ctcgagaagattgacgataa

SEQ ID NO: 2039 - DNA, 20 bp, synthetic construct
  source 1..20: mol_type = other DNA
ctcctggctcagtttactag

SEQ ID NO: 2040 - DNA, 20 bp, synthetic construct
  source 1..20: mol_type = other DNA
ctcctgcctccaccaatcgc

SEQ ID NO: 2041 - DNA, 20 bp, synthetic construct
  source 1..20: mol_type = other DNA
ctcctaccttgttggcgtct

SEQ ID NO: 2042 - DNA, 20 bp, synthetic construct
  source 1..20: mol_type = other DNA
ctccctcgcctcgcagacga

SEQ ID NO: 2043 - DNA, 20 bp, synthetic construct
  source 1..20: mol_type = other DNA
ctcccataggaattttccga

SEQ ID NO: 2044 - DNA, 21 bp, synthetic construct
  source 1..21: mol_type = other DNA
ctccatgttcagcgcagggtc

SEQ ID NO: 2045 - DNA, 20 bp, synthetic construct
  source 1..20: mol_type = other DNA
ctccagacctgctgcgagca

SEQ ID NO: 2046 - DNA, 21 bp, synthetic construct
  source 1..21: mol_type = other DNA
ctccaccccaaaaggcctccg

SEQ ID NO: 2047 - DNA, 20 bp, synthetic construct
  source 1..20: mol_type = other DNA
ctccaccaatcgccagacag

SEQ ID NO: 2048 - DNA, 20 bp, synthetic construct
  source 1..20: mol_type = other DNA
ctccaagctgtgccttgggt

SEQ ID NO: 2049 - DNA, 20 bp, synthetic construct
  source 1..20: mol_type = other DNA
ctccaacttgtcctggttat

SEQ ID NO: 2050 - DNA, 20 bp, synthetic construct
  source 1..20: mol_type = other DNA
ctcatcctcaggccatgcag

SEQ ID NO: 2051 - DNA, 20 bp, synthetic construct
  source 1..20: mol_type = other DNA
ctcaggctcagggcatacta

SEQ ID NO: 2052 - DNA, 20 bp, synthetic construct
  source 1..20: mol_type = other DNA
ctcaccatactgcactcagg

SEQ ID NO: 2053 - DNA, 20 bp, synthetic construct
  source 1..20: mol_type = other DNA
ctcaccaacctcctgtcctc

SEQ ID NO: 2054 - DNA, 20 bp, synthetic construct
  source 1..20: mol_type = other DNA
ctcacaataccgcagagtct

SEQ ID NO: 2055 - DNA, 21 bp, synthetic construct
  source 1..21: mol_type = other DNA
ctcaatctcgggaacctcaat

SEQ ID NO: 2056 - DNA, 20 bp, synthetic construct
  source 1..20: mol_type = other DNA
ctcaagatgctgtacagact

SEQ ID NO: 2057 - DNA, 20 bp, synthetic construct
  source 1..20: mol_type = other DNA
ctatttacacactctatgga

SEQ ID NO: 2058 - DNA, 20 bp, synthetic construct
  source 1..20: mol_type = other DNA
ctattgattggaaagtatgt

SEQ ID NO: 2059 - DNA, 20 bp, synthetic construct
  source 1..20: mol_type = other DNA
ctattaacaggcctattgat

SEQ ID NO: 2060 - DNA, 21 bp, synthetic construct
  source 1..21: mol_type = other DNA
ctatgtgttgtttctctctta

SEQ ID NO: 2061 - DNA, 20 bp, synthetic construct
  source 1..20: mol_type = other DNA
ctatcctatcaacacttccg

SEQ ID NO: 2062 - DNA, 20 bp, synthetic construct
  source 1..20: mol_type = other DNA
ctataacggtttctcttcca

SEQ ID NO: 2063 - DNA, 21 bp, synthetic construct
  source 1..21: mol_type = other DNA
ctagtagtcagttatgtcaac

SEQ ID NO: 2064 - DNA, 20 bp, synthetic construct
  source 1..20: mol_type = other DNA
ctagtaaactgagccaggag

SEQ ID NO: 2065 - DNA, 21 bp, synthetic construct
  source 1..21: mol_type = other DNA
ctaggttttatccaaaggtta

SEQ ID NO: 2066 - DNA, 20 bp, synthetic construct
  source 1..20: mol_type = other DNA
ctagctacctgggtgggtgt

SEQ ID NO: 2067 - DNA, 20 bp, synthetic construct
  source 1..20: mol_type = other DNA
ctagccgcttgttttgctcg

SEQ ID NO: 2068 - DNA, 20 bp, synthetic construct
  source 1..20: mol_type = other DNA
ctagcaggcataatcaattg

SEQ ID NO: 2069 - DNA, 20 bp, synthetic construct
  source 1..20: mol_type = other DNA
ctagagtcattagttccccc

SEQ ID NO: 2070 - DNA, 20 bp, synthetic construct
  source 1..20: mol_type = other DNA
ctagactctgcggtattgtg

SEQ ID NO: 2071 - DNA, 20 bp, synthetic construct
  source 1..20: mol_type = other DNA
ctagaagatctcgtactgaa

SEQ ID NO: 2072 - DNA, 21 bp, synthetic construct
  source 1..21: mol_type = other DNA
ctactgttgttagacgacgag

SEQ ID NO: 2073 - DNA, 20 bp, synthetic construct
  source 1..20: mol_type = other DNA
ctactgttgttagacgacga

SEQ ID NO: 2074 - DNA, 20 bp, synthetic construct
  source 1..20: mol_type = other DNA
ctactaggtctctagatgct

SEQ ID NO: 2075 - DNA, 20 bp, synthetic construct
  source 1..20: mol_type = other DNA
ctacgaaccactgaacaaat

SEQ ID NO: 2076 - DNA, 20 bp, synthetic construct
  source 1..20: mol_type = other DNA
ctaccttgttggcgtctggc

SEQ ID NO: 2077 - DNA, 21 bp, synthetic construct
  source 1..21: mol_type = other DNA
ctaatgactctagctacctgg

SEQ ID NO: 2078 - DNA, 20 bp, synthetic construct
  source 1..20: mol_type = other DNA
ctaatatgggcctaaagttc

SEQ ID NO: 2079 - DNA, 20 bp, synthetic construct
  source 1..20: mol_type = other DNA
ctaacaacagtagtttccgg

SEQ ID NO: 2080 - DNA, 20 bp, synthetic construct
  source 1..20: mol_type = other DNA
cgttgccgggcaacggggta

SEQ ID NO: 2081 - DNA, 21 bp, synthetic construct
  source 1..21: mol_type = other DNA
cgttgacattgcagagagtcc

SEQ ID NO: 2082 - DNA, 20 bp, synthetic construct
  source 1..20: mol_type = other DNA
cgttgacattgcagagagtc

SEQ ID NO: 2083 - DNA, 20 bp, synthetic construct
  source 1..20: mol_type = other DNA
cgttccgaccgaccacgggg

SEQ ID NO: 2084 - DNA, 20 bp, synthetic construct
  source 1..20: mol_type = other DNA
cgttcacggtggtctccatg

SEQ ID NO: 2085 - DNA, 20 bp, synthetic construct
  source 1..20: mol_type = other DNA
cgtgtgtcttggccaaaatt

SEQ ID NO: 2086 - DNA, 21 bp, synthetic construct
  source 1..21: mol_type = other DNA
cgtgctggtggttgaggatcc

SEQ ID NO: 2087 - DNA, 20 bp, synthetic construct
  source 1..20: mol_type = other DNA
cgtgcggtggggtgaaaccc

SEQ ID NO: 2088 - DNA, 20 bp, synthetic construct
  source 1..20: mol_type = other DNA
cgtgcagaggtgaagcgaag

SEQ ID NO: 2089 - DNA, 20 bp, synthetic construct
  source 1..20: mol_type = other DNA
cgtgaacgcccaccgaatgt

SEQ ID NO: 2090 - DNA, 21 bp, synthetic construct
  source 1..21: mol_type = other DNA
cgtctggccaggtgtccttgt

SEQ ID NO: 2091 - DNA, 21 bp, synthetic construct
  source 1..21: mol_type = other DNA
cgtctaacaacagtagtttcc

SEQ ID NO: 2092 - DNA, 20 bp, synthetic construct
  source 1..20: mol_type = other DNA
cgtctaacaacagtagtttc

SEQ ID NO: 2093 - DNA, 20 bp, synthetic construct
  source 1..20: mol_type = other DNA
cgtcgcatggagaccaccgt

SEQ ID NO: 2094 - DNA, 20 bp, synthetic construct
  source 1..20: mol_type = other DNA
cgtccgaaggtttggtacag

SEQ ID NO: 2095 - DNA, 20 bp, synthetic construct
  source 1..20: mol_type = other DNA
cgtcccgcgcaggatccagt

SEQ ID NO: 2096 - DNA, 20 bp, synthetic construct
  source 1..20: mol_type = other DNA
cgtcagcaaacacttggcac

SEQ ID NO: 2097 - DNA, 20 bp, synthetic construct
  source 1..20: mol_type = other DNA
cgtcaatcttctcgaggatt

SEQ ID NO: 2098 - DNA, 20 bp, synthetic construct
  source 1..20: mol_type = other DNA
cgtactgaaggaaagaagtc

SEQ ID NO: 2099 - DNA, 20 bp, synthetic construct
  source 1..20: mol_type = other DNA
cgtaaacaaaggacgtcccg

SEQ ID NO: 2100 - DNA, 20 bp, synthetic construct
  source 1..20: mol_type = other DNA
cggtttctcttccaaaagtg

SEQ ID NO: 2101 - DNA, 20 bp, synthetic construct
  source 1..20: mol_type = other DNA
cggtggggtgaaacccagcc

SEQ ID NO: 2102 - DNA, 20 bp, synthetic construct
  source 1..20: mol_type = other DNA
cggtcggaacggcagacgga

SEQ ID NO: 2103 - DNA, 20 bp, synthetic construct
  source 1..20: mol_type = other DNA
cggtaaaaagggactcaaga

SEQ ID NO: 2104 - DNA, 20 bp, synthetic construct
  source 1..20: mol_type = other DNA
cgggtatattatataagaga

SEQ ID NO: 2105 - DNA, 20 bp, synthetic construct
  source 1..20: mol_type = other DNA
cggggtttttcttgttgaca

SEQ ID NO: 2106 - DNA, 20 bp, synthetic construct
  source 1..20: mol_type = other DNA
cggggagtccgcgtaaagag

SEQ ID NO: 2107 - DNA, 20 bp, synthetic construct
  source 1..20: mol_type = other DNA
cgggctgggtttcaccccac

SEQ ID NO: 2108 - DNA, 21 bp, synthetic construct
  source 1..21: mol_type = other DNA
cgggctgaggcccactcccat

SEQ ID NO: 2109 - DNA, 20 bp, synthetic construct
  source 1..20: mol_type = other DNA
cgggctgaggcccactccca

SEQ ID NO: 2110 - DNA, 20 bp, synthetic construct
  source 1..20: mol_type = other DNA
cgggcaacggggtaaaggtt

SEQ ID NO: 2111 - DNA, 20 bp, synthetic construct
  source 1..20: mol_type = other DNA
cgggaagccttagagtctcc

SEQ ID NO: 2112 - DNA, 20 bp, synthetic construct
  source 1..20: mol_type = other DNA
cggctaggagttccgcagta

SEQ ID NO: 2113 - DNA, 20 bp, synthetic construct
  source 1..20: mol_type = other DNA
cggcgattgagaccttcgtc

SEQ ID NO: 2114 - DNA, 20 bp, synthetic construct
  source 1..20: mol_type = other DNA
cggcagacggagaaggggac

SEQ ID NO: 2115 - DNA, 20 bp, synthetic construct
  source 1..20: mol_type = other DNA
cggacgacccttctcggggt

SEQ ID NO: 2116 - DNA, 20 bp, synthetic construct
  source 1..20: mol_type = other DNA
cggaagtgttgataggatag

SEQ ID NO: 2117 - DNA, 20 bp, synthetic construct
  source 1..20: mol_type = other DNA
cggaacggcagacggagaag

SEQ ID NO: 2118 - DNA, 20 bp, synthetic construct
  source 1..20: mol_type = other DNA
cggaaactactgttgttaga

SEQ ID NO: 2119 - DNA, 20 bp, synthetic construct
  source 1..20: mol_type = other DNA
cggaaaattcctatgggagt

SEQ ID NO: 2120 - DNA, 20 bp, synthetic construct
  source 1..20: mol_type = other DNA
cgcgtgcgtggaaccttttc

SEQ ID NO: 2121 - DNA, 21 bp, synthetic construct
  source 1..21: mol_type = other DNA
cgcgtaaagagaggtgcgccc

SEQ ID NO: 2122 - DNA, 20 bp, synthetic construct
  source 1..20: mol_type = other DNA
cgcgctgatggcccatgacc

SEQ ID NO: 2123 - DNA, 20 bp, synthetic construct
  source 1..20: mol_type = other DNA
cgcctcgcagacgaaggtct

SEQ ID NO: 2124 - DNA, 20 bp, synthetic construct
  source 1..20: mol_type = other DNA
cgcctcctgcctccaccaat

SEQ ID NO: 2125 - DNA, 20 bp, synthetic construct
  source 1..20: mol_type = other DNA
cgcctcagctctgtatcggg

SEQ ID NO: 2126 - DNA, 20 bp, synthetic construct
  source 1..20: mol_type = other DNA
cgccgcgtcgcagaagatct

SEQ ID NO: 2127 - DNA, 20 bp, synthetic construct
  source 1..20: mol_type = other DNA
cgccgacgggacgtaaacaa

SEQ ID NO: 2128 - DNA, 20 bp, synthetic construct
  source 1..20: mol_type = other DNA
cgccccgtggtcggtcggaa

SEQ ID NO: 2129 - DNA, 20 bp, synthetic construct
  source 1..20: mol_type = other DNA
cgccaacaaggtaggagctg

SEQ ID NO: 2130 - DNA, 20 bp, synthetic construct
  source 1..20: mol_type = other DNA
cgcatggagaccaccgtgaa

SEQ ID NO: 2131 - DNA, 20 bp, synthetic construct
  source 1..20: mol_type = other DNA
cgcagtatggatcggcagag

SEQ ID NO: 2132 - DNA, 21 bp, synthetic construct
  source 1..21: mol_type = other DNA
cgcagggtccccaatcctcga

SEQ ID NO: 2133 - DNA, 20 bp, synthetic construct
  source 1..20: mol_type = other DNA
cgcagggtccccaatcctcg

SEQ ID NO: 2134 - DNA, 20 bp, synthetic construct
  source 1..20: mol_type = other DNA
cgcaggattcagcgccgacg

SEQ ID NO: 2135 - DNA, 20 bp, synthetic construct
  source 1..20: mol_type = other DNA
cgcaggataaccacattgtg

SEQ ID NO: 2136 - DNA, 20 bp, synthetic construct
  source 1..20: mol_type = other DNA
cgcagaccaatttatgccta

SEQ ID NO: 2137 - DNA, 20 bp, synthetic construct
  source 1..20: mol_type = other DNA
cgcagaagatctcaatctcg

SEQ ID NO: 2138 - DNA, 20 bp, synthetic construct
  source 1..20: mol_type = other DNA
cgcacggaggccttttgggg

SEQ ID NO: 2139 - DNA, 21 bp, synthetic construct
  source 1..21: mol_type = other DNA
cgcaacccccactggctgggg

SEQ ID NO: 2140 - DNA, 20 bp, synthetic construct
  source 1..20: mol_type = other DNA
cgattggtggaggcaggagg

SEQ ID NO: 2141 - DNA, 20 bp, synthetic construct
  source 1..20: mol_type = other DNA
cgattgagaccttcgtctgc

SEQ ID NO: 2142 - DNA, 20 bp, synthetic construct
  source 1..20: mol_type = other DNA
cgatgtatatttgcgggaga

SEQ ID NO: 2143 - DNA, 20 bp, synthetic construct
  source 1..20: mol_type = other DNA
cgagggagttcttcttctag

SEQ ID NO: 2144 - DNA, 20 bp, synthetic construct
  source 1..20: mol_type = other DNA
cgaggcaggtcccctagaag

SEQ ID NO: 2145 - DNA, 20 bp, synthetic construct
  source 1..20: mol_type = other DNA
cgagcaaaacaagcggctag

SEQ ID NO: 2146 - DNA, 20 bp, synthetic construct
  source 1..20: mol_type = other DNA
cgagaagattgacgataagg

SEQ ID NO: 2147 - DNA, 20 bp, synthetic construct
  source 1..20: mol_type = other DNA
cgagaaagtgaaagcctgct

SEQ ID NO: 2148 - DNA, 20 bp, synthetic construct
  source 1..20: mol_type = other DNA
cgacgtgcagaggtgaagcg

SEQ ID NO: 2149 - DNA, 20 bp, synthetic construct
  source 1..20: mol_type = other DNA
cgacgaggcaggtcccctag

SEQ ID NO: 2150 - DNA, 20 bp, synthetic construct
  source 1..20: mol_type = other DNA
cgaccttgaggcatacttca

SEQ ID NO: 2151 - DNA, 20 bp, synthetic construct
  source 1..20: mol_type = other DNA
cgacccttctcggggtcgct

SEQ ID NO: 2152 - DNA, 20 bp, synthetic construct
  source 1..20: mol_type = other DNA
cgacccttataaagaatttg

SEQ ID NO: 2153 - DNA, 20 bp, synthetic construct
  source 1..20: mol_type = other DNA
cgaccccgagaagggtcgtc

SEQ ID NO: 2154 - DNA, 21 bp, synthetic construct
  source 1..21: mol_type = other DNA
cgaattttggccaagacacac

SEQ ID NO: 2155 - DNA, 20 bp, synthetic construct
  source 1..20: mol_type = other DNA
cgaattttggccaagacaca

SEQ ID NO: 2156 - DNA, 20 bp, synthetic construct
  source 1..20: mol_type = other DNA
cgaagtgcacacggtccggc

SEQ ID NO: 2157 - DNA, 20 bp, synthetic construct
  source 1..20: mol_type = other DNA
cgaaggtttggtacagcaac

SEQ ID NO: 2158 - DNA, 20 bp, synthetic construct
  source 1..20: mol_type = other DNA
ccttttggggtggagccctc

SEQ ID NO: 2159 - DNA, 20 bp, synthetic construct
  source 1..20: mol_type = other DNA
cctttggataaaacctagca

SEQ ID NO: 2160 - DNA, 20 bp, synthetic construct
  source 1..20: mol_type = other DNA
ccttgttgggattgaagtcc

SEQ ID NO: 2161 - DNA, 20 bp, synthetic construct
  source 1..20: mol_type = other DNA
ccttgggtggctttggggca

SEQ ID NO: 2162 - DNA, 20 bp, synthetic construct
  source 1..20: mol_type = other DNA
ccttggactcataaggtggg

SEQ ID NO: 2163 - DNA, 20 bp, synthetic construct
  source 1..20: mol_type = other DNA
ccttgatagtccagaagaac

SEQ ID NO: 2164 - DNA, 20 bp, synthetic construct
  source 1..20: mol_type = other DNA
ccttcgtctgcgaggcgagg

SEQ ID NO: 2165 - DNA, 20 bp, synthetic construct
  source 1..20: mol_type = other DNA
ccttcctgtctggcgattgg

SEQ ID NO: 2166 - DNA, 20 bp, synthetic construct
  source 1..20: mol_type = other DNA
ccttccatagagtgtgtaaa

SEQ ID NO: 2167 - DNA, 20 bp, synthetic construct
  source 1..20: mol_type = other DNA
ccttcagtacgagatcttct

SEQ ID NO: 2168 - DNA, 21 bp, synthetic construct
  source 1..21: mol_type = other DNA
ccttattatccagaacatcta

SEQ ID NO: 2169 - DNA, 20 bp, synthetic construct
  source 1..20: mol_type = other DNA
ccttatcgtcaatcttctcg

SEQ ID NO: 2170 - DNA, 20 bp, synthetic construct
  source 1..20: mol_type = other DNA
cctgttaataggaagttttc

SEQ ID NO: 2171 - DNA, 20 bp, synthetic construct
  source 1..20: mol_type = other DNA
cctgtctttaatcctcattg

SEQ ID NO: 2172 - DNA, 20 bp, synthetic construct
  source 1..20: mol_type = other DNA
cctgtctggcgattggtgga

SEQ ID NO: 2173 - DNA, 20 bp, synthetic construct
  source 1..20: mol_type = other DNA
cctgggtgggtgttaatttg

SEQ ID NO: 2174 - DNA, 20 bp, synthetic construct
  source 1..20: mol_type = other DNA
cctggccgttgccgggcaac

SEQ ID NO: 2175 - DNA, 20 bp, synthetic construct
  source 1..20: mol_type = other DNA
cctggccagacgccaacaag

SEQ ID NO: 2176 - DNA, 20 bp, synthetic construct
  source 1..20: mol_type = other DNA
cctggaattagaggacaaac

SEQ ID NO: 2177 - DNA, 20 bp, synthetic construct
  source 1..20: mol_type = other DNA
cctgctggtggctccagttc

SEQ ID NO: 2178 - DNA, 20 bp, synthetic construct
  source 1..20: mol_type = other DNA
cctgctgcgagcaaaacaag

SEQ ID NO: 2179 - DNA, 20 bp, synthetic construct
  source 1..20: mol_type = other DNA
cctgcgttaatgcccttgta

SEQ ID NO: 2180 - DNA, 20 bp, synthetic construct
  source 1..20: mol_type = other DNA
cctgcggacgacccttctcg

SEQ ID NO: 2181 - DNA, 21 bp, synthetic construct
  source 1..21: mol_type = other DNA
cctgcctcgtcgtctaacaac

SEQ ID NO: 2182 - DNA, 20 bp, synthetic construct
  source 1..20: mol_type = other DNA
cctgcctcgtcgtctaacaa

SEQ ID NO: 2183 - DNA, 20 bp, synthetic construct
  source 1..20: mol_type = other DNA
cctgcatgactactgctcaa

SEQ ID NO: 2184 - DNA, 20 bp, synthetic construct
  source 1..20: mol_type = other DNA
cctgagggctccaccccaaa

SEQ ID NO: 2185 - DNA, 20 bp, synthetic construct
  source 1..20: mol_type = other DNA
cctgaggatgagtgtttctc

SEQ ID NO: 2186 - DNA, 20 bp, synthetic construct
  source 1..20: mol_type = other DNA
cctgaactttaggcccatat

SEQ ID NO: 2187 - DNA, 20 bp, synthetic construct
  source 1..20: mol_type = other DNA
cctgaactggagccaccagc

SEQ ID NO: 2188 - DNA, 20 bp, synthetic construct
  source 1..20: mol_type = other DNA
cctctgggattctttcccga

SEQ ID NO: 2189 - DNA, 20 bp, synthetic construct
  source 1..20: mol_type = other DNA
cctctcactctgggatcttg

SEQ ID NO: 2190 - DNA, 20 bp, synthetic construct
  source 1..20: mol_type = other DNA
cctctatgtatccctcctgt

SEQ ID NO: 2191 - DNA, 21 bp, synthetic construct
  source 1..21: mol_type = other DNA
cctcgcctcgcagacgaaggt

SEQ ID NO: 2192 - DNA, 20 bp, synthetic construct
  source 1..20: mol_type = other DNA
cctcgagaagattgacgata

SEQ ID NO: 2193 - DNA, 20 bp, synthetic construct
  source 1..20: mol_type = other DNA
cctcctagtacaaagacctt

SEQ ID NO: 2194 - DNA, 20 bp, synthetic construct
  source 1..20: mol_type = other DNA
cctcccagtctttaaacaaa

SEQ ID NO: 2195 - DNA, 20 bp, synthetic construct
  source 1..20: mol_type = other DNA
cctccagcttatagaccacc

SEQ ID NO: 2196 - DNA, 20 bp, synthetic construct
  source 1..20: mol_type = other DNA
cctccaagctgtgccttggg

SEQ ID NO: 2197 - DNA, 20 bp, synthetic construct
  source 1..20: mol_type = other DNA
cctcacaataccgcagagtc

SEQ ID NO: 2198 - DNA, 20 bp, synthetic construct
  source 1..20: mol_type = other DNA
cctcaatgttagtattcctt

SEQ ID NO: 2199 - DNA, 20 bp, synthetic construct
  source 1..20: mol_type = other DNA
cctatcctatcaacacttcc

SEQ ID NO: 2200 - DNA, 20 bp, synthetic construct
  source 1..20: mol_type = other DNA
cctagaaaattgagagaagt

SEQ ID NO: 2201 - DNA, 20 bp, synthetic construct
  source 1..20: mol_type = other DNA
cctacgaaccactgaacaaa

SEQ ID NO: 2202 - DNA, 20 bp, synthetic construct
  source 1..20: mol_type = other DNA
cctacagcctcctagtacaa

SEQ ID NO: 2203 - DNA, 20 bp, synthetic construct
  source 1..20: mol_type = other DNA
cctaatatacatttacacca

SEQ ID NO: 2204 - DNA, 20 bp, synthetic construct
  source 1..20: mol_type = other DNA
cctaacaaaacaaagagatg

SEQ ID NO: 2205 - DNA, 20 bp, synthetic construct
  source 1..20: mol_type = other DNA
ccgtttgtcctctaattcca

SEQ ID NO: 2206 - DNA, 21 bp, synthetic construct
  source 1..21: mol_type = other DNA
ccgtttctcctggctcagttt

SEQ ID NO: 2207 - DNA, 20 bp, synthetic construct
  source 1..20: mol_type = other DNA
ccgttgccgggcaacggggt

SEQ ID NO: 2208 - DNA, 21 bp, synthetic construct
  source 1..21: mol_type = other DNA
ccgtgtgtcttggccaaaatt

SEQ ID NO: 2209 - DNA, 20 bp, synthetic construct
  source 1..20: mol_type = other DNA
ccgtggtcggtcggaacggc

SEQ ID NO: 2210 - DNA, 20 bp, synthetic construct
  source 1..20: mol_type = other DNA
ccgtgcggtggggtgaaacc

SEQ ID NO: 2211 - DNA, 20 bp, synthetic construct
  source 1..20: mol_type = other DNA
ccgtcggcgctgaatcctgc

SEQ ID NO: 2212 - DNA, 20 bp, synthetic construct
  source 1..20: mol_type = other DNA
ccggaagtgttgataggata

SEQ ID NO: 2213 - DNA, 20 bp, synthetic construct
  source 1..20: mol_type = other DNA
ccgcttgttttgctcgcagc

SEQ ID NO: 2214 - DNA, 20 bp, synthetic construct
  source 1..20: mol_type = other DNA
ccgctgtctccacctttgag

SEQ ID NO: 2215 - DNA, 20 bp, synthetic construct
  source 1..20: mol_type = other DNA
ccgcgcaggatccagttggc

SEQ ID NO: 2216 - DNA, 20 bp, synthetic construct
  source 1..20: mol_type = other DNA
ccgccttccatagagtgtgt

SEQ ID NO: 2217 - DNA, 20 bp, synthetic construct
  source 1..20: mol_type = other DNA
ccgcctcagctctgtatcgg

SEQ ID NO: 2218 - DNA, 20 bp, synthetic construct
  source 1..20: mol_type = other DNA
ccgcaggattcagcgccgac

SEQ ID NO: 2219 - DNA, 20 bp, synthetic construct
  source 1..20: mol_type = other DNA
ccgaccttgaggcatacttc

SEQ ID NO: 2220 - DNA, 20 bp, synthetic construct
  source 1..20: mol_type = other DNA
ccgaaggtttggtacagcaa

SEQ ID NO: 2221 - DNA, 21 bp, synthetic construct
  source 1..21: mol_type = other DNA
ccgaaaaggttccacgcacgc

SEQ ID NO: 2222 - DNA, 20 bp, synthetic construct
  source 1..20: mol_type = other DNA
ccgaaaaggttccacgcacg

SEQ ID NO: 2223 - DNA, 20 bp, synthetic construct
  source 1..20: mol_type = other DNA
cccttctcgtgttacaggcg

SEQ ID NO: 2224 - DNA, 20 bp, synthetic construct
  source 1..20: mol_type = other DNA
cccttctccgtctgccgttc

SEQ ID NO: 2225 - DNA, 20 bp, synthetic construct
  source 1..20: mol_type = other DNA
cccttatcgtcaatcttctc

SEQ ID NO: 2226 - DNA, 20 bp, synthetic construct
  source 1..20: mol_type = other DNA
ccctgctggtggctccagtt

SEQ ID NO: 2227 - DNA, 20 bp, synthetic construct
  source 1..20: mol_type = other DNA
ccctatcctatcaacacttc

SEQ ID NO: 2228 - DNA, 20 bp, synthetic construct
  source 1..20: mol_type = other DNA
ccctagaagaagaactccct

SEQ ID NO: 2229 - DNA, 20 bp, synthetic construct
  source 1..20: mol_type = other DNA
ccctaacaaaacaaagagat

SEQ ID NO: 2230 - DNA, 20 bp, synthetic construct
  source 1..20: mol_type = other DNA
cccgtttgtcctctaattcc

SEQ ID NO: 2231 - DNA, 20 bp, synthetic construct
  source 1..20: mol_type = other DNA
cccgttgcccggcaacggcc

SEQ ID NO: 2232 - DNA, 20 bp, synthetic construct
  source 1..20: mol_type = other DNA
cccgtggtcggtcggaacgg

SEQ ID NO: 2233 - DNA, 20 bp, synthetic construct
  source 1..20: mol_type = other DNA
cccgtctgtgccttctcatc

SEQ ID NO: 2234 - DNA, 20 bp, synthetic construct
  source 1..20: mol_type = other DNA
cccgtcggcgctgaatcctg

SEQ ID NO: 2235 - DNA, 20 bp, synthetic construct
  source 1..20: mol_type = other DNA
cccggcaacggccaggtctg

SEQ ID NO: 2236 - DNA, 20 bp, synthetic construct
  source 1..20: mol_type = other DNA
cccgctgtctccacctttga

SEQ ID NO: 2237 - DNA, 20 bp, synthetic construct
  source 1..20: mol_type = other DNA
cccgcgcaggatccagttgg

SEQ ID NO: 2238 - DNA, 20 bp, synthetic construct
  source 1..20: mol_type = other DNA
cccgccttccatagagtgtg

SEQ ID NO: 2239 - DNA, 20 bp, synthetic construct
  source 1..20: mol_type = other DNA
cccgcctgtaacacgagaag

SEQ ID NO: 2240 - DNA, 20 bp, synthetic construct
  source 1..20: mol_type = other DNA
cccgagattgagatcttctg

SEQ ID NO: 2241 - DNA, 20 bp, synthetic construct
  source 1..20: mol_type = other DNA
cccgagaagggtcgtccgca

SEQ ID NO: 2242 - DNA, 20 bp, synthetic construct
  source 1..20: mol_type = other DNA
cccgaccaccagttggatcc

SEQ ID NO: 2243 - DNA, 20 bp, synthetic construct
  source 1..20: mol_type = other DNA
ccccttctcgtgttacaggc

SEQ ID NO: 2244 - DNA, 20 bp, synthetic construct
  source 1..20: mol_type = other DNA
ccccgttgcccggcaacggc

SEQ ID NO: 2245 - DNA, 20 bp, synthetic construct
  source 1..20: mol_type = other DNA
ccccgctgtctccacctttg

SEQ ID NO: 2246 - DNA, 20 bp, synthetic construct
  source 1..20: mol_type = other DNA
ccccgcctgtaacacgagaa

SEQ ID NO: 2247 - DNA, 20 bp, synthetic construct
  source 1..20: mol_type = other DNA
ccccgagaagggtcgtccgc

SEQ ID NO: 2248 - DNA, 20 bp, synthetic construct
  source 1..20: mol_type = other DNA
ccccccagcaaagaattgct

SEQ ID NO: 2249 - DNA, 20 bp, synthetic construct
  source 1..20: mol_type = other DNA
ccccaccttatgagtccaag

SEQ ID NO: 2250 - DNA, 21 bp, synthetic construct
  source 1..21: mol_type = other DNA
ccccaccgcacggaggccttt

SEQ ID NO: 2251 - DNA, 20 bp, synthetic construct
  source 1..20: mol_type = other DNA
ccccaactcctcccagtctt

SEQ ID NO: 2252 - DNA, 20 bp, synthetic construct
  source 1..20: mol_type = other DNA
ccccaaagccacccaaggca

SEQ ID NO: 2253 - DNA, 21 bp, synthetic construct
  source 1..21: mol_type = other DNA
ccccaaaaggcctccgtgcgg

SEQ ID NO: 2254 - DNA, 20 bp, synthetic construct
  source 1..20: mol_type = other DNA
cccatcatcctgggctttcg

SEQ ID NO: 2255 - DNA, 20 bp, synthetic construct
  source 1..20: mol_type = other DNA
cccagaggattgctggtgga

SEQ ID NO: 2256 - DNA, 20 bp, synthetic construct
  source 1..20: mol_type = other DNA
cccacttacagttaatgaga

SEQ ID NO: 2257 - DNA, 20 bp, synthetic construct
  source 1..20: mol_type = other DNA
cccaccgcacggaggccttt

SEQ ID NO: 2258 - DNA, 20 bp, synthetic construct
  source 1..20: mol_type = other DNA
cccaactcctcccagtcttt

SEQ ID NO: 2259 - DNA, 20 bp, synthetic construct
  source 1..20: mol_type = other DNA
cccaacctccaatcactcac

SEQ ID NO: 2260 - DNA, 20 bp, synthetic construct
  source 1..20: mol_type = other DNA
cccaaagccacccaaggcac

SEQ ID NO: 2261 - DNA, 20 bp, synthetic construct
  source 1..20: mol_type = other DNA
cccaaaaggcctccgtgcgg

SEQ ID NO: 2262 - DNA, 20 bp, synthetic construct
  source 1..20: mol_type = other DNA
ccatttgttcagtggttcgt

SEQ ID NO: 2263 - DNA, 20 bp, synthetic construct
  source 1..20: mol_type = other DNA
ccatggctgctaggctgtgc

SEQ ID NO: 2264 - DNA, 20 bp, synthetic construct
  source 1..20: mol_type = other DNA
ccatggatacgatgtatatt

SEQ ID NO: 2265 - DNA, 20 bp, synthetic construct
  source 1..20: mol_type = other DNA
ccatgcgacgtgcagaggtg

SEQ ID NO: 2266 - DNA, 20 bp, synthetic construct
  source 1..20: mol_type = other DNA
ccatgcaactttttcacctc

SEQ ID NO: 2267 - DNA, 20 bp, synthetic construct
  source 1..20: mol_type = other DNA
ccatcatcctgggctttcgg

SEQ ID NO: 2268 - DNA, 20 bp, synthetic construct
  source 1..20: mol_type = other DNA
ccatataactgaaagccaaa

SEQ ID NO: 2269 - DNA, 21 bp, synthetic construct
  source 1..21: mol_type = other DNA
ccatagagtgtgtaaatagtg

SEQ ID NO: 2270 - DNA, 20 bp, synthetic construct
  source 1..20: mol_type = other DNA
ccatactgcactcaggcaag

SEQ ID NO: 2271 - DNA, 20 bp, synthetic construct
  source 1..20: mol_type = other DNA
ccagttggatccagccttca

SEQ ID NO: 2272 - DNA, 20 bp, synthetic construct
  source 1..20: mol_type = other DNA
ccagtgggggttgcgtcagc

SEQ ID NO: 2273 - DNA, 20 bp, synthetic construct
  source 1..20: mol_type = other DNA
ccaggtgtccttgttgggat

SEQ ID NO: 2274 - DNA, 20 bp, synthetic construct
  source 1..20: mol_type = other DNA
ccaggtctgtgccaagtgtt

SEQ ID NO: 2275 - DNA, 21 bp, synthetic construct
  source 1..21: mol_type = other DNA
ccaggatgatgggatgggaat

SEQ ID NO: 2276 - DNA, 20 bp, synthetic construct
  source 1..20: mol_type = other DNA
ccagcttatagaccaccaaa

SEQ ID NO: 2277 - DNA, 20 bp, synthetic construct
  source 1..20: mol_type = other DNA
ccagccttcagagcaaacac

SEQ ID NO: 2278 - DNA, 20 bp, synthetic construct
  source 1..20: mol_type = other DNA
ccagccagtgggggttgcgt

SEQ ID NO: 2279 - DNA, 21 bp, synthetic construct
  source 1..21: mol_type = other DNA
ccagcatctagagacctagta

SEQ ID NO: 2280 - DNA, 20 bp, synthetic construct
  source 1..20: mol_type = other DNA
ccagattgggacttcaatcc

SEQ ID NO: 2281 - DNA, 20 bp, synthetic construct
  source 1..20: mol_type = other DNA
ccagaggattgctggtggaa

SEQ ID NO: 2282 - DNA, 20 bp, synthetic construct
  source 1..20: mol_type = other DNA
ccagacgccaacaaggtagg

SEQ ID NO: 2283 - DNA, 20 bp, synthetic construct
  source 1..20: mol_type = other DNA
ccacttacagttaatgagaa

SEQ ID NO: 2284 - DNA, 20 bp, synthetic construct
  source 1..20: mol_type = other DNA
ccactgcatggcctgaggat

SEQ ID NO: 2285 - DNA, 20 bp, synthetic construct
  source 1..20: mol_type = other DNA
ccaccgcacggaggcctttt

SEQ ID NO: 2286 - DNA, 20 bp, synthetic construct
  source 1..20: mol_type = other DNA
ccacattgtgtaaatggggc

SEQ ID NO: 2287 - DNA, 20 bp, synthetic construct
  source 1..20: mol_type = other DNA
ccacatcatccatataactg

SEQ ID NO: 2288 - DNA, 21 bp, synthetic construct
  source 1..21: mol_type = other DNA
ccacaattcgttgacatactt

SEQ ID NO: 2289 - DNA, 21 bp, synthetic construct
  source 1..21: mol_type = other DNA
ccaatgaggattaaagacagg

SEQ ID NO: 2290 - DNA, 20 bp, synthetic construct
  source 1..20: mol_type = other DNA
ccaatcgccagacaggaagg

SEQ ID NO: 2291 - DNA, 20 bp, synthetic construct
  source 1..20: mol_type = other DNA
ccaatcaataggcctgttaa

SEQ ID NO: 2292 - DNA, 20 bp, synthetic construct
  source 1..20: mol_type = other DNA
ccaataccacatcatccata

SEQ ID NO: 2293 - DNA, 20 bp, synthetic construct
  source 1..20: mol_type = other DNA
ccaagtctgtacagcatctt

SEQ ID NO: 2294 - DNA, 20 bp, synthetic construct
  source 1..20: mol_type = other DNA
ccaagaatatggtgacccac

SEQ ID NO: 2295 - DNA, 20 bp, synthetic construct
  source 1..20: mol_type = other DNA
ccaacaagaagatgaggcat

SEQ ID NO: 2296 - DNA, 20 bp, synthetic construct
  source 1..20: mol_type = other DNA
ccaaatatttaccattggat

SEQ ID NO: 2297 - DNA, 20 bp, synthetic construct
  source 1..20: mol_type = other DNA
ccaaactctgcaagatccca

SEQ ID NO: 2298 - DNA, 20 bp, synthetic construct
  source 1..20: mol_type = other DNA
ccaaaccttcggacggaaat

SEQ ID NO: 2299 - DNA, 20 bp, synthetic construct
  source 1..20: mol_type = other DNA
ccaaaaggcctccgtgcggt

SEQ ID NO: 2300 - DNA, 20 bp, synthetic construct
  source 1..20: mol_type = other DNA
ccaaaagacccacaattcgt

SEQ ID NO: 2301 - DNA, 20 bp, synthetic construct
  source 1..20: mol_type = other DNA
catttgttcagtggttcgta

SEQ ID NO: 2302 - DNA, 20 bp, synthetic construct
  source 1..20: mol_type = other DNA
catttggtggtctataagct

SEQ ID NO: 2303 - DNA, 20 bp, synthetic construct
  source 1..20: mol_type = other DNA
catttcttgtctcacttttg

SEQ ID NO: 2304 - DNA, 20 bp, synthetic construct
  source 1..20: mol_type = other DNA
catttacaccaagacattat

SEQ ID NO: 2305 - DNA, 20 bp, synthetic construct
  source 1..20: mol_type = other DNA
catttaaaccctaacaaaac

SEQ ID NO: 2306 - DNA, 20 bp, synthetic construct
  source 1..20: mol_type = other DNA
cattgttcacctcaccatac

SEQ ID NO: 2307 - DNA, 20 bp, synthetic construct
  source 1..20: mol_type = other DNA
cattgtgtaaatggggcagc

SEQ ID NO: 2308 - DNA, 20 bp, synthetic construct
  source 1..20: mol_type = other DNA
cattggaagttatgggtcct

SEQ ID NO: 2309 - DNA, 21 bp, synthetic construct
  source 1..21: mol_type = other DNA
cattggaaaacaccatctttt

SEQ ID NO: 2310 - DNA, 20 bp, synthetic construct
  source 1..20: mol_type = other DNA
cattgaggttcccgagattg

SEQ ID NO: 2311 - DNA, 20 bp, synthetic construct
  source 1..20: mol_type = other DNA
cattcggtgggcgttcacgg

SEQ ID NO: 2312 - DNA, 20 bp, synthetic construct
  source 1..20: mol_type = other DNA
cattagttccccccagcaaa

SEQ ID NO: 2313 - DNA, 20 bp, synthetic construct
  source 1..20: mol_type = other DNA
catgttcagcgcagggtccc

SEQ ID NO: 2314 - DNA, 20 bp, synthetic construct
  source 1..20: mol_type = other DNA
catggtgctggtgcgcagac

SEQ ID NO: 2315 - DNA, 21 bp, synthetic construct
  source 1..21: mol_type = other DNA
catggtcccgtgctggtggtt

SEQ ID NO: 2316 - DNA, 20 bp, synthetic construct
  source 1..20: mol_type = other DNA
catggtcccgtgctggtggt

SEQ ID NO: 2317 - DNA, 20 bp, synthetic construct
  source 1..20: mol_type = other DNA
catggacatcgacccttata

SEQ ID NO: 2318 - DNA, 21 bp, synthetic construct
  source 1..21: mol_type = other DNA
catgctgtagatcttgttccc

SEQ ID NO: 2319 - DNA, 20 bp, synthetic construct
  source 1..20: mol_type = other DNA
catgctgtagatcttgttcc

SEQ ID NO: 2320 - DNA, 20 bp, synthetic construct
  source 1..20: mol_type = other DNA
catgcgacgtgcagaggtga

SEQ ID NO: 2321 - DNA, 20 bp, synthetic construct
  source 1..20: mol_type = other DNA
catgccccaaagccacccaa

SEQ ID NO: 2322 - DNA, 20 bp, synthetic construct
  source 1..20: mol_type = other DNA
catgcatacaagggcattaa

SEQ ID NO: 2323 - DNA, 21 bp, synthetic construct
  source 1..21: mol_type = other DNA
catgaccaagccccagccagt

SEQ ID NO: 2324 - DNA, 20 bp, synthetic construct
  source 1..20: mol_type = other DNA
catgaccaagccccagccag

SEQ ID NO: 2325 - DNA, 20 bp, synthetic construct
  source 1..20: mol_type = other DNA
catcttgagtccctttttac

SEQ ID NO: 2326 - DNA, 20 bp, synthetic construct
  source 1..20: mol_type = other DNA
catcttcttgttggttcttc

SEQ ID NO: 2327 - DNA, 20 bp, synthetic construct
  source 1..20: mol_type = other DNA
catcttcctcttcatcctgc

SEQ ID NO: 2328 - DNA, 20 bp, synthetic construct
  source 1..20: mol_type = other DNA
catcgtatccatggctgcta

SEQ ID NO: 2329 - DNA, 20 bp, synthetic construct
  source 1..20: mol_type = other DNA
catccatataactgaaagcc

SEQ ID NO: 2330 - DNA, 20 bp, synthetic construct
  source 1..20: mol_type = other DNA
catccagcgataaccaggac

SEQ ID NO: 2331 - DNA, 20 bp, synthetic construct
  source 1..20: mol_type = other DNA
catcatcctgggctttcgga

SEQ ID NO: 2332 - DNA, 20 bp, synthetic construct
  source 1..20: mol_type = other DNA
catattagtgttgacataac

SEQ ID NO: 2333 - DNA, 21 bp, synthetic construct
  source 1..21: mol_type = other DNA
cataggaattttccgaaagcc

SEQ ID NO: 2334 - DNA, 20 bp, synthetic construct
  source 1..20: mol_type = other DNA
cataggaattttccgaaagc

SEQ ID NO: 2335 - DNA, 20 bp, synthetic construct
  source 1..20: mol_type = other DNA
catagcagcaggatgaagag

SEQ ID NO: 2336 - DNA, 20 bp, synthetic construct
  source 1..20: mol_type = other DNA
catagaggttccttgagcag

SEQ ID NO: 2337 - DNA, 20 bp, synthetic construct
  source 1..20: mol_type = other DNA
catactgcggaactcctagc

SEQ ID NO: 2338 - DNA, 20 bp, synthetic construct
  source 1..20: mol_type = other DNA
catactacaaactttgccag

SEQ ID NO: 2339 - DNA, 20 bp, synthetic construct
  source 1..20: mol_type = other DNA
cataccttgatagtccagaa

SEQ ID NO: 2340 - DNA, 20 bp, synthetic construct
  source 1..20: mol_type = other DNA
catacaagggcattaacgca

SEQ ID NO: 2341 - DNA, 20 bp, synthetic construct
  source 1..20: mol_type = other DNA
cataaggtggggaactttac

SEQ ID NO: 2342 - DNA, 20 bp, synthetic construct
  source 1..20: mol_type = other DNA
cataacccataaaattcaga

SEQ ID NO: 2343 - DNA, 20 bp, synthetic construct
  source 1..20: mol_type = other DNA
cataaattggtctgcgcacc

SEQ ID NO: 2344 - DNA, 21 bp, synthetic construct
  source 1..21: mol_type = other DNA
cagtttgtaggcccacttaca

SEQ ID NO: 2345 - DNA, 20 bp, synthetic construct
  source 1..20: mol_type = other DNA
cagttggcagcacagcctag

SEQ ID NO: 2346 - DNA, 20 bp, synthetic construct
  source 1..20: mol_type = other DNA
cagttggatccagccttcag

SEQ ID NO: 2347 - DNA, 20 bp, synthetic construct
  source 1..20: mol_type = other DNA
cagttatgtcaacactaata

SEQ ID NO: 2348 - DNA, 21 bp, synthetic construct
  source 1..21: mol_type = other DNA
cagttaatgagaaaagaagat

SEQ ID NO: 2349 - DNA, 20 bp, synthetic construct
  source 1..20: mol_type = other DNA
cagtctttgaagtatgcctc

SEQ ID NO: 2350 - DNA, 20 bp, synthetic construct
  source 1..20: mol_type = other DNA
cagtatggtgaggtgaacaa

SEQ ID NO: 2351 - DNA, 21 bp, synthetic construct
  source 1..21: mol_type = other DNA
cagtagctccaaattctttat

SEQ ID NO: 2352 - DNA, 20 bp, synthetic construct
  source 1..20: mol_type = other DNA
cagtagctccaaattcttta

SEQ ID NO: 2353 - DNA, 21 bp, synthetic construct
  source 1..21: mol_type = other DNA
cagtagaagaataaagaccag

SEQ ID NO: 2354 - DNA, 20 bp, synthetic construct
  source 1..20: mol_type = other DNA
cagtaaagttccccacctta

SEQ ID NO: 2355 - DNA, 20 bp, synthetic construct
  source 1..20: mol_type = other DNA
caggtgtccttgttgggatt

SEQ ID NO: 2356 - DNA, 20 bp, synthetic construct
  source 1..20: mol_type = other DNA
caggtgcaatttccgtccga

SEQ ID NO: 2357 - DNA, 20 bp, synthetic construct
  source 1..20: mol_type = other DNA
caggtattgtttacacagaa

SEQ ID NO: 2358 - DNA, 20 bp, synthetic construct
  source 1..20: mol_type = other DNA
caggtacagtagaagaataa

SEQ ID NO: 2359 - DNA, 20 bp, synthetic construct
  source 1..20: mol_type = other DNA
cagggtccccaatcctcgag

SEQ ID NO: 2360 - DNA, 20 bp, synthetic construct
  source 1..20: mol_type = other DNA
caggatgaagaggaagatga

SEQ ID NO: 2361 - DNA, 20 bp, synthetic construct
  source 1..20: mol_type = other DNA
caggatccagttggcagcac

SEQ ID NO: 2362 - DNA, 20 bp, synthetic construct
  source 1..20: mol_type = other DNA
caggaggttggtgagtgatt

SEQ ID NO: 2363 - DNA, 20 bp, synthetic construct
  source 1..20: mol_type = other DNA
caggaggcggatttgctggc

SEQ ID NO: 2364 - DNA, 20 bp, synthetic construct
  source 1..20: mol_type = other DNA
caggagactctaaggcttcc

SEQ ID NO: 2365 - DNA, 20 bp, synthetic construct
  source 1..20: mol_type = other DNA
caggacaagttggaggacag

SEQ ID NO: 2366 - DNA, 20 bp, synthetic construct
  source 1..20: mol_type = other DNA
cagcttggaggcttgaacag

SEQ ID NO: 2367 - DNA, 21 bp, synthetic construct
  source 1..21: mol_type = other DNA
cagctctgtatcgggaagcct

SEQ ID NO: 2368 - DNA, 20 bp, synthetic construct
  source 1..20: mol_type = other DNA
cagcggtaaaaagggactca

SEQ ID NO: 2369 - DNA, 20 bp, synthetic construct
  source 1..20: mol_type = other DNA
cagcgccgacgggacgtaaa

SEQ ID NO: 2370 - DNA, 20 bp, synthetic construct
  source 1..20: mol_type = other DNA
cagcgataaccaggacaagt

SEQ ID NO: 2371 - DNA, 21 bp, synthetic construct
  source 1..21: mol_type = other DNA
cagcctcctagtacaaagacc

SEQ ID NO: 2372 - DNA, 20 bp, synthetic construct
  source 1..20: mol_type = other DNA
cagcctagcagccatggata

SEQ ID NO: 2373 - DNA, 20 bp, synthetic construct
  source 1..20: mol_type = other DNA
cagccagtgggggttgcgtc

SEQ ID NO: 2374 - DNA, 20 bp, synthetic construct
  source 1..20: mol_type = other DNA
cagcatggggcagaatcttt

SEQ ID NO: 2375 - DNA, 20 bp, synthetic construct
  source 1..20: mol_type = other DNA
cagcaggatgaagaggaaga

SEQ ID NO: 2376 - DNA, 20 bp, synthetic construct
  source 1..20: mol_type = other DNA
cagcacagcctagcagccat

SEQ ID NO: 2377 - DNA, 20 bp, synthetic construct
  source 1..20: mol_type = other DNA
cagcaacaggagggatacat

SEQ ID NO: 2378 - DNA, 20 bp, synthetic construct
  source 1..20: mol_type = other DNA
cagcaaagaattgcttgcct

SEQ ID NO: 2379 - DNA, 20 bp, synthetic construct
  source 1..20: mol_type = other DNA
cagatgagaaggcacagacg

SEQ ID NO: 2380 - DNA, 20 bp, synthetic construct
  source 1..20: mol_type = other DNA
cagagtttggtgaaaggttg

SEQ ID NO: 2381 - DNA, 20 bp, synthetic construct
  source 1..20: mol_type = other DNA
cagagctgaggcggtatcta

SEQ ID NO: 2382 - DNA, 20 bp, synthetic construct
  source 1..20: mol_type = other DNA
cagagcaaacacagcaaatc

SEQ ID NO: 2383 - DNA, 20 bp, synthetic construct
  source 1..20: mol_type = other DNA
cagacggggagtccgcgtaa

SEQ ID NO: 2384 - DNA, 20 bp, synthetic construct
  source 1..20: mol_type = other DNA
cagacggagaaggggacgag

SEQ ID NO: 2385 - DNA, 20 bp, synthetic construct
  source 1..20: mol_type = other DNA
cagacgaaggtctcaatcgc

SEQ ID NO: 2386 - DNA, 20 bp, synthetic construct
  source 1..20: mol_type = other DNA
cagacctggccgttgccggg

SEQ ID NO: 2387 - DNA, 20 bp, synthetic construct
  source 1..20: mol_type = other DNA
cagacctgctgcgagcaaaa

SEQ ID NO: 2388 - DNA, 20 bp, synthetic construct
  source 1..20: mol_type = other DNA
cagacacatccagcgataac

SEQ ID NO: 2389 - DNA, 20 bp, synthetic construct
  source 1..20: mol_type = other DNA
cagaagaaccaacaagaaga

SEQ ID NO: 2390 - DNA, 20 bp, synthetic construct
  source 1..20: mol_type = other DNA
cactttctcgccaacttaca

SEQ ID NO: 2391 - DNA, 21 bp, synthetic construct
  source 1..21: mol_type = other DNA
cacttacagttaatgagaaaa

SEQ ID NO: 2392 - DNA, 20 bp, synthetic construct
  source 1..20: mol_type = other DNA
cacttacagttaatgagaaa

SEQ ID NO: 2393 - DNA, 21 bp, synthetic construct
  source 1..21: mol_type = other DNA
cactgtttggctttcagttat

SEQ ID NO: 2394 - DNA, 20 bp, synthetic construct
  source 1..20: mol_type = other DNA
cactggctggggcttggtca

SEQ ID NO: 2395 - DNA, 20 bp, synthetic construct
  source 1..20: mol_type = other DNA
cactgaacaaatggcactag

SEQ ID NO: 2396 - DNA, 20 bp, synthetic construct
  source 1..20: mol_type = other DNA
cactcccataggaattttcc

SEQ ID NO: 2397 - DNA, 20 bp, synthetic construct
  source 1..20: mol_type = other DNA
cactcaggcaagcaattctt

SEQ ID NO: 2398 - DNA, 20 bp, synthetic construct
  source 1..20: mol_type = other DNA
cactatttacacactctatg

SEQ ID NO: 2399 - DNA, 20 bp, synthetic construct
  source 1..20: mol_type = other DNA
cactagtaaactgagccagg

SEQ ID NO: 2400 - DNA, 20 bp, synthetic construct
  source 1..20: mol_type = other DNA
cacggtccggcagatgagaa

SEQ ID NO: 2401 - DNA, 20 bp, synthetic construct
  source 1..20: mol_type = other DNA
cacggaggccttttggggtg

SEQ ID NO: 2402 - DNA, 20 bp, synthetic construct
  source 1..20: mol_type = other DNA
cacctggccagacgccaaca

SEQ ID NO: 2403 - DNA, 20 bp, synthetic construct
  source 1..20: mol_type = other DNA
cacctctgcacgtcgcatgg

SEQ ID NO: 2404 - DNA, 20 bp, synthetic construct
  source 1..20: mol_type = other DNA
cacctcaccatactgcactc

SEQ ID NO: 2405 - DNA, 20 bp, synthetic construct
  source 1..20: mol_type = other DNA
caccgcacggaggccttttg

SEQ ID NO: 2406 - DNA, 20 bp, synthetic construct
  source 1..20: mol_type = other DNA
caccccaaaaggcctccgtg

SEQ ID NO: 2407 - DNA, 20 bp, synthetic construct
  source 1..20: mol_type = other DNA
cacccaaggcacagcttgga

SEQ ID NO: 2408 - DNA, 20 bp, synthetic construct
  source 1..20: mol_type = other DNA
caccatactgcactcaggca

SEQ ID NO: 2409 - DNA, 20 bp, synthetic construct
  source 1..20: mol_type = other DNA
caccagttggatccagcctt

SEQ ID NO: 2410 - DNA, 20 bp, synthetic construct
  source 1..20: mol_type = other DNA
caccagcacgggaccatgcc

SEQ ID NO: 2411 - DNA, 20 bp, synthetic construct
  source 1..20: mol_type = other DNA
caccaatcgccagacaggaa

SEQ ID NO: 2412 - DNA, 20 bp, synthetic construct
  source 1..20: mol_type = other DNA
caccaaactctgcaagatcc

SEQ ID NO: 2413 - DNA, 20 bp, synthetic construct
  source 1..20: mol_type = other DNA
cacattttttgataatgtct

SEQ ID NO: 2414 - DNA, 20 bp, synthetic construct
  source 1..20: mol_type = other DNA
cacatttcttgtctcacttt

SEQ ID NO: 2415 - DNA, 20 bp, synthetic construct
  source 1..20: mol_type = other DNA
cacatcatccatataactga

SEQ ID NO: 2416 - DNA, 20 bp, synthetic construct
  source 1..20: mol_type = other DNA
cacatcatacaaaaaatcaa

SEQ ID NO: 2417 - DNA, 20 bp, synthetic construct
  source 1..20: mol_type = other DNA
cacatagcgcctcattttgt

SEQ ID NO: 2418 - DNA, 20 bp, synthetic construct
  source 1..20: mol_type = other DNA
cacagacggggagtccgcgt

SEQ ID NO: 2419 - DNA, 20 bp, synthetic construct
  source 1..20: mol_type = other DNA
cacagacctggccgttgccg

SEQ ID NO: 2420 - DNA, 20 bp, synthetic construct
  source 1..20: mol_type = other DNA
cacagaaaggccttgtaagt

SEQ ID NO: 2421 - DNA, 20 bp, synthetic construct
  source 1..20: mol_type = other DNA
cacacggtccggcagatgag

SEQ ID NO: 2422 - DNA, 20 bp, synthetic construct
  source 1..20: mol_type = other DNA
cacacggtagttccccctag

SEQ ID NO: 2423 - DNA, 20 bp, synthetic construct
  source 1..20: mol_type = other DNA
cacaagagttgcctgaactt

SEQ ID NO: 2424 - DNA, 20 bp, synthetic construct
  source 1..20: mol_type = other DNA
cacaagaacacatcatacaa

SEQ ID NO: 2425 - DNA, 20 bp, synthetic construct
  source 1..20: mol_type = other DNA
cacaacctttcaccaaactc

SEQ ID NO: 2426 - DNA, 20 bp, synthetic construct
  source 1..20: mol_type = other DNA
caattcgttgacatactttc

SEQ ID NO: 2427 - DNA, 20 bp, synthetic construct
  source 1..20: mol_type = other DNA
caatgtcaacgaccgacctt

SEQ ID NO: 2428 - DNA, 20 bp, synthetic construct
  source 1..20: mol_type = other DNA
caatgctcaggagactctaa

SEQ ID NO: 2429 - DNA, 20 bp, synthetic construct
  source 1..20: mol_type = other DNA
caatctggatttgctgtgtt

SEQ ID NO: 2430 - DNA, 20 bp, synthetic construct
  source 1..20: mol_type = other DNA
caatcgccagacaggaaggc

SEQ ID NO: 2431 - DNA, 20 bp, synthetic construct
  source 1..20: mol_type = other DNA
caatcccaacaaggacacct

SEQ ID NO: 2432 - DNA, 21 bp, synthetic construct
  source 1..21: mol_type = other DNA
caatcaataggcctgttaata

SEQ ID NO: 2433 - DNA, 20 bp, synthetic construct
  source 1..20: mol_type = other DNA
caatcaataggcctgttaat

SEQ ID NO: 2434 - DNA, 20 bp, synthetic construct
  source 1..20: mol_type = other DNA
caagttggaggacaggaggt

SEQ ID NO: 2435 - DNA, 20 bp, synthetic construct
  source 1..20: mol_type = other DNA
caaggacccataacttccaa

SEQ ID NO: 2436 - DNA, 20 bp, synthetic construct
  source 1..20: mol_type = other DNA
caagcctccaagctgtgcct

SEQ ID NO: 2437 - DNA, 20 bp, synthetic construct
  source 1..20: mol_type = other DNA
caagcaattctttgctgggg

SEQ ID NO: 2438 - DNA, 20 bp, synthetic construct
  source 1..20: mol_type = other DNA
caagatctacagcatggggc

SEQ ID NO: 2439 - DNA, 20 bp, synthetic construct
  source 1..20: mol_type = other DNA
caagagttgcctgaacttta

SEQ ID NO: 2440 - DNA, 20 bp, synthetic construct
  source 1..20: mol_type = other DNA
caagacattatcaaaaaatg

SEQ ID NO: 2441 - DNA, 20 bp, synthetic construct
  source 1..20: mol_type = other DNA
caagaatcctcacaataccg

SEQ ID NO: 2442 - DNA, 20 bp, synthetic construct
  source 1..20: mol_type = other DNA
caagaatatggtgacccaca

SEQ ID NO: 2443 - DNA, 21 bp, synthetic construct
  source 1..21: mol_type = other DNA
caagaagatgaggcatagcag

SEQ ID NO: 2444 - DNA, 20 bp, synthetic construct
  source 1..20: mol_type = other DNA
caagaagatgaggcatagca

SEQ ID NO: 2445 - DNA, 20 bp, synthetic construct
  source 1..20: mol_type = other DNA
caagaaatgtgaaaccacaa

SEQ ID NO: 2446 - DNA, 20 bp, synthetic construct
  source 1..20: mol_type = other DNA
caacttgtcctggttatcgc

SEQ ID NO: 2447 - DNA, 20 bp, synthetic construct
  source 1..20: mol_type = other DNA
caacctttcaccaaactctg

SEQ ID NO: 2448 - DNA, 20 bp, synthetic construct
  source 1..20: mol_type = other DNA
caaccaccagcacgggacca

SEQ ID NO: 2449 - DNA, 21 bp, synthetic construct
  source 1..21: mol_type = other DNA
caacattcggtgggcgttcac

SEQ ID NO: 2450 - DNA, 20 bp, synthetic construct
  source 1..20: mol_type = other DNA
caacattcggtgggcgttca

SEQ ID NO: 2451 - DNA, 20 bp, synthetic construct
  source 1..20: mol_type = other DNA
caacataccttgatagtcca

SEQ ID NO: 2452 - DNA, 21 bp, synthetic construct
  source 1..21: mol_type = other DNA
caacacatagcgcctcatttt

SEQ ID NO: 2453 - DNA, 20 bp, synthetic construct
  source 1..20: mol_type = other DNA
caaattaacacccacccagg

SEQ ID NO: 2454 - DNA, 20 bp, synthetic construct
  source 1..20: mol_type = other DNA
caaatggcactagtaaactg

SEQ ID NO: 2455 - DNA, 20 bp, synthetic construct
  source 1..20: mol_type = other DNA
caaatatttaccattggata

SEQ ID NO: 2456 - DNA, 20 bp, synthetic construct
  source 1..20: mol_type = other DNA
caaatatacatcgtatccat

SEQ ID NO: 2457 - DNA, 20 bp, synthetic construct
  source 1..20: mol_type = other DNA
caaagtttgtagtatgccct

SEQ ID NO: 2458 - DNA, 20 bp, synthetic construct
  source 1..20: mol_type = other DNA
caaaggtggagacagcgggg

SEQ ID NO: 2459 - DNA, 21 bp, synthetic construct
  source 1..21: mol_type = other DNA
caaaggacgtcccgcgcagga

SEQ ID NO: 2460 - DNA, 20 bp, synthetic construct
  source 1..20: mol_type = other DNA
caaagacaaaagaaaattgg

SEQ ID NO: 2461 - DNA, 20 bp, synthetic construct
  source 1..20: mol_type = other DNA
caaagaattgcttgcctgag

SEQ ID NO: 2462 - DNA, 20 bp, synthetic construct
  source 1..20: mol_type = other DNA
caaacacttggcacagacct

SEQ ID NO: 2463 - DNA, 20 bp, synthetic construct
  source 1..20: mol_type = other DNA
caaacacagcaaatccagat

SEQ ID NO: 2464 - DNA, 21 bp, synthetic construct
  source 1..21: mol_type = other DNA
caaaattcgcagtccccaacc

SEQ ID NO: 2465 - DNA, 20 bp, synthetic construct
  source 1..20: mol_type = other DNA
caaaagtgagacaagaaatg

SEQ ID NO: 2466 - DNA, 20 bp, synthetic construct
  source 1..20: mol_type = other DNA
caaaaggcctccgtgcggtg

SEQ ID NO: 2467 - DNA, 20 bp, synthetic construct
  source 1..20: mol_type = other DNA
caaaagaaaattggtaacag

SEQ ID NO: 2468 - DNA, 20 bp, synthetic construct
  source 1..20: mol_type = other DNA
caaaaacgagagtaactcca

SEQ ID NO: 2469 - DNA, 20 bp, synthetic construct
  source 1..20: mol_type = other DNA
caaaaaatgtgaacagtttg

SEQ ID NO: 2470 - DNA, 20 bp, synthetic construct
  source 1..20: mol_type = other DNA
caaaaaatcaaagaatgttt

SEQ ID NO: 2471 - DNA, 21 bp, synthetic construct
  source 1..21: mol_type = other DNA
attttttgataatgtcttggt

SEQ ID NO: 2472 - DNA, 20 bp, synthetic construct
  source 1..20: mol_type = other DNA
attttggccaagacacacgg

SEQ ID NO: 2473 - DNA, 20 bp, synthetic construct
  source 1..20: mol_type = other DNA
attttatgggttatgtcatt

SEQ ID NO: 2474 - DNA, 20 bp, synthetic construct
  source 1..20: mol_type = other DNA
atttgttcagtggttcgtag

SEQ ID NO: 2475 - DNA, 20 bp, synthetic construct
  source 1..20: mol_type = other DNA
atttggtgtctttcggagtg

SEQ ID NO: 2476 - DNA, 21 bp, synthetic construct
  source 1..21: mol_type = other DNA
atttggtggtctataagctgg

SEQ ID NO: 2477 - DNA, 20 bp, synthetic construct
  source 1..20: mol_type = other DNA
atttggtggtctataagctg

SEQ ID NO: 2478 - DNA, 20 bp, synthetic construct
  source 1..20: mol_type = other DNA
atttggaagatccagcatct

SEQ ID NO: 2479 - DNA, 20 bp, synthetic construct
  source 1..20: mol_type = other DNA
atttgctgtgtttgctctga

SEQ ID NO: 2480 - DNA, 20 bp, synthetic construct
  source 1..20: mol_type = other DNA
atttgcgggagaggacaaca

SEQ ID NO: 2481 - DNA, 20 bp, synthetic construct
  source 1..20: mol_type = other DNA
atttcttgtctcacttttgg

SEQ ID NO: 2482 - DNA, 20 bp, synthetic construct
  source 1..20: mol_type = other DNA
atttacaccaagacattatc

SEQ ID NO: 2483 - DNA, 21 bp, synthetic construct
  source 1..21: mol_type = other DNA
atttaaaccctaacaaaacaa

SEQ ID NO: 2484 - DNA, 20 bp, synthetic construct
  source 1..20: mol_type = other DNA
atttaaaccctaacaaaaca

SEQ ID NO: 2485 - DNA, 20 bp, synthetic construct
  source 1..20: mol_type = other DNA
attgtgtaaatggggcagca

SEQ ID NO: 2486 - DNA, 20 bp, synthetic construct
  source 1..20: mol_type = other DNA
attgtgggtcttttgggttt

SEQ ID NO: 2487 - DNA, 20 bp, synthetic construct
  source 1..20: mol_type = other DNA
attgtgaggattcttgtcaa

SEQ ID NO: 2488 - DNA, 20 bp, synthetic construct
  source 1..20: mol_type = other DNA
attggtaacagcggtaaaaa

SEQ ID NO: 2489 - DNA, 20 bp, synthetic construct
  source 1..20: mol_type = other DNA
attgggggccaagtctgtac

SEQ ID NO: 2490 - DNA, 20 bp, synthetic construct
  source 1..20: mol_type = other DNA
attgggacttcaatcccaac

SEQ ID NO: 2491 - DNA, 20 bp, synthetic construct
  source 1..20: mol_type = other DNA
attgagatcttctgcgacgc

SEQ ID NO: 2492 - DNA, 20 bp, synthetic construct
  source 1..20: mol_type = other DNA
attgagaccttcgtctgcga

SEQ ID NO: 2493 - DNA, 20 bp, synthetic construct
  source 1..20: mol_type = other DNA
attgaatacatgcatacaag

SEQ ID NO: 2494 - DNA, 20 bp, synthetic construct
  source 1..20: mol_type = other DNA
attctttcccgaccaccagt

SEQ ID NO: 2495 - DNA, 20 bp, synthetic construct
  source 1..20: mol_type = other DNA
attcttgggaacaagatcta

SEQ ID NO: 2496 - DNA, 20 bp, synthetic construct
  source 1..20: mol_type = other DNA
attcgcactcctccagctta

SEQ ID NO: 2497 - DNA, 20 bp, synthetic construct
  source 1..20: mol_type = other DNA
attccttggactcataaggt

SEQ ID NO: 2498 - DNA, 20 bp, synthetic construct
  source 1..20: mol_type = other DNA
attcctatgggagtgggcct

SEQ ID NO: 2499 - DNA, 20 bp, synthetic construct
  source 1..20: mol_type = other DNA
attcccatcccatcatcctg

SEQ ID NO: 2500 - DNA, 20 bp, synthetic construct
  source 1..20: mol_type = other DNA
attccaggatcctcaaccac

SEQ ID NO: 2501 - DNA, 20 bp, synthetic construct
  source 1..20: mol_type = other DNA
attcagcgccgacgggacgt

SEQ ID NO: 2502 - DNA, 20 bp, synthetic construct
  source 1..20: mol_type = other DNA
attaactgtaagtgggccta

SEQ ID NO: 2503 - DNA, 20 bp, synthetic construct
  source 1..20: mol_type = other DNA
attaacaggcctattgattg

SEQ ID NO: 2504 - DNA, 21 bp, synthetic construct
  source 1..21: mol_type = other DNA
attaacacccacccaggtagc

SEQ ID NO: 2505 - DNA, 20 bp, synthetic construct
  source 1..20: mol_type = other DNA
attaaaggtctttgtactag

SEQ ID NO: 2506 - DNA, 20 bp, synthetic construct
  source 1..20: mol_type = other DNA
attaaagacaggtacagtag

SEQ ID NO: 2507 - DNA, 20 bp, synthetic construct
  source 1..20: mol_type = other DNA
atgttgcccaaggtcttaca

SEQ ID NO: 2508 - DNA, 20 bp, synthetic construct
  source 1..20: mol_type = other DNA
atgttctggataataaggtt

SEQ ID NO: 2509 - DNA, 20 bp, synthetic construct
  source 1..20: mol_type = other DNA
atgttctccatgttcagcgc

SEQ ID NO: 2510 - DNA, 20 bp, synthetic construct
  source 1..20: mol_type = other DNA
atgtggttatcctgcgttaa

SEQ ID NO: 2511 - DNA, 20 bp, synthetic construct
  source 1..20: mol_type = other DNA
atgtgatgttctccatgttc

SEQ ID NO: 2512 - DNA, 20 bp, synthetic construct
  source 1..20: mol_type = other DNA
atgtcaacgaccgaccttga

SEQ ID NO: 2513 - DNA, 21 bp, synthetic construct
  source 1..21: mol_type = other DNA
atgtcaacactaatatgggcc

SEQ ID NO: 2514 - DNA, 20 bp, synthetic construct
  source 1..20: mol_type = other DNA
atgtatacccaaagacaaaa

SEQ ID NO: 2515 - DNA, 20 bp, synthetic construct
  source 1..20: mol_type = other DNA
atggtgaggtgaacaatgct

SEQ ID NO: 2516 - DNA, 20 bp, synthetic construct
  source 1..20: mol_type = other DNA
atggtcccgtgctggtggtt

SEQ ID NO: 2517 - DNA, 21 bp, synthetic construct
  source 1..21: mol_type = other DNA
atggtaaatatttggtaacct

SEQ ID NO: 2518 - DNA, 20 bp, synthetic construct
  source 1..20: mol_type = other DNA
atggggcagcaaaacccaaa

SEQ ID NO: 2519 - DNA, 21 bp, synthetic construct
  source 1..21: mol_type = other DNA
atggggcagaatctttccacc

SEQ ID NO: 2520 - DNA, 20 bp, synthetic construct
  source 1..20: mol_type = other DNA
atggggcagaatctttccac

SEQ ID NO: 2521 - DNA, 20 bp, synthetic construct
  source 1..20: mol_type = other DNA
atgggccatcagcgcgtgcg

SEQ ID NO: 2522 - DNA, 20 bp, synthetic construct
  source 1..20: mol_type = other DNA
atgggatgggaatacaggtg

SEQ ID NO: 2523 - DNA, 21 bp, synthetic construct
  source 1..21: mol_type = other DNA
atggcccatgaccaagcccca

SEQ ID NO: 2524 - DNA, 20 bp, synthetic construct
  source 1..20: mol_type = other DNA
atggcccatgaccaagcccc

SEQ ID NO: 2525 - DNA, 20 bp, synthetic construct
  source 1..20: mol_type = other DNA
atggcactagtaaactgagc

SEQ ID NO: 2526 - DNA, 20 bp, synthetic construct
  source 1..20: mol_type = other DNA
atggatgatgtggtattggg

SEQ ID NO: 2527 - DNA, 21 bp, synthetic construct
  source 1..21: mol_type = other DNA
atggatcggcagaggagccga

SEQ ID NO: 2528 - DNA, 20 bp, synthetic construct
  source 1..20: mol_type = other DNA
atggatcggcagaggagccg

SEQ ID NO: 2529 - DNA, 20 bp, synthetic construct
  source 1..20: mol_type = other DNA
atggatacgatgtatatttg

SEQ ID NO: 2530 - DNA, 20 bp, synthetic construct
  source 1..20: mol_type = other DNA
atggacatcgacccttataa

SEQ ID NO: 2531 - DNA, 20 bp, synthetic construct
  source 1..20: mol_type = other DNA
atgctgtagatcttgttccc

SEQ ID NO: 2532 - DNA, 21 bp, synthetic construct
  source 1..21: mol_type = other DNA
atgcgacgtgcagaggtgaag

SEQ ID NO: 2533 - DNA, 20 bp, synthetic construct
  source 1..20: mol_type = other DNA
atgcctgctaggttttatcc

SEQ ID NO: 2534 - DNA, 20 bp, synthetic construct
  source 1..20: mol_type = other DNA
atgcctacagcctcctagta

SEQ ID NO: 2535 - DNA, 20 bp, synthetic construct
  source 1..20: mol_type = other DNA
atgcatgtattcaatctaag

SEQ ID NO: 2536 - DNA, 21 bp, synthetic construct
  source 1..21: mol_type = other DNA
atgcatacaagggcattaacg

SEQ ID NO: 2537 - DNA, 20 bp, synthetic construct
  source 1..20: mol_type = other DNA
atgcatacaagggcattaac

SEQ ID NO: 2538 - DNA, 20 bp, synthetic construct
  source 1..20: mol_type = other DNA
atgattaggcagaggtgaaa

SEQ ID NO: 2539 - DNA, 20 bp, synthetic construct
  source 1..20: mol_type = other DNA
atgatgtgttcttgtggcaa

SEQ ID NO: 2540 - DNA, 20 bp, synthetic construct
  source 1..20: mol_type = other DNA
atgatgtggtattgggggcc

SEQ ID NO: 2541 - DNA, 21 bp, synthetic construct
  source 1..21: mol_type = other DNA
atgatgggatgggaatacagg

SEQ ID NO: 2542 - DNA, 20 bp, synthetic construct
  source 1..20: mol_type = other DNA
atgagtgtttctcaaaggtg

SEQ ID NO: 2543 - DNA, 20 bp, synthetic construct
  source 1..20: mol_type = other DNA
atgaggcatagcagcaggat

SEQ ID NO: 2544 - DNA, 20 bp, synthetic construct
  source 1..20: mol_type = other DNA
atgaggattaaagacaggta

SEQ ID NO: 2545 - DNA, 20 bp, synthetic construct
  source 1..20: mol_type = other DNA
atgactctagctacctgggt

SEQ ID NO: 2546 - DNA, 20 bp, synthetic construct
  source 1..20: mol_type = other DNA
atgaccaagccccagccagt

SEQ ID NO: 2547 - DNA, 20 bp, synthetic construct
  source 1..20: mol_type = other DNA
atgacataacccataaaatt

SEQ ID NO: 2548 - DNA, 21 bp, synthetic construct
  source 1..21: mol_type = other DNA
atgaacaagagatgattaggc

SEQ ID NO: 2549 - DNA, 20 bp, synthetic construct
  source 1..20: mol_type = other DNA
atgaacaagagatgattagg

SEQ ID NO: 2550 - DNA, 21 bp, synthetic construct
  source 1..21: mol_type = other DNA
atctttccaccagcaatcctc

SEQ ID NO: 2551 - DNA, 20 bp, synthetic construct
  source 1..20: mol_type = other DNA
atcttgcagagtttggtgaa

SEQ ID NO: 2552 - DNA, 20 bp, synthetic construct
  source 1..20: mol_type = other DNA
atcttcttgttggttcttct

SEQ ID NO: 2553 - DNA, 20 bp, synthetic construct
  source 1..20: mol_type = other DNA
atcttctgcgacgcggcgat

SEQ ID NO: 2554 - DNA, 21 bp, synthetic construct
  source 1..21: mol_type = other DNA
atcttccaaattaacacccac

SEQ ID NO: 2555 - DNA, 21 bp, synthetic construct
  source 1..21: mol_type = other DNA
atctctttgttttgttagggt

SEQ ID NO: 2556 - DNA, 20 bp, synthetic construct
  source 1..20: mol_type = other DNA
atctagttaatcattacttc

SEQ ID NO: 2557 - DNA, 20 bp, synthetic construct
  source 1..20: mol_type = other DNA
atctagaagatctcgtactg

SEQ ID NO: 2558 - DNA, 20 bp, synthetic construct
  source 1..20: mol_type = other DNA
atcgacccttataaagaatt

SEQ ID NO: 2559 - DNA, 20 bp, synthetic construct
  source 1..20: mol_type = other DNA
atcctgcggacgacccttct

SEQ ID NO: 2560 - DNA, 20 bp, synthetic construct
  source 1..20: mol_type = other DNA
atcctcgagaagattgacga

SEQ ID NO: 2561 - DNA, 20 bp, synthetic construct
  source 1..20: mol_type = other DNA
atccctcctgttgctgtacc

SEQ ID NO: 2562 - DNA, 20 bp, synthetic construct
  source 1..20: mol_type = other DNA
atcccatcatcctgggcttt

SEQ ID NO: 2563 - DNA, 21 bp, synthetic construct
  source 1..21: mol_type = other DNA
atcccagaggattgctggtgg

SEQ ID NO: 2564 - DNA, 20 bp, synthetic construct
  source 1..20: mol_type = other DNA
atcccagaggattgctggtg

SEQ ID NO: 2565 - DNA, 20 bp, synthetic construct
  source 1..20: mol_type = other DNA
atccatactgcggaactcct

SEQ ID NO: 2566 - DNA, 20 bp, synthetic construct
  source 1..20: mol_type = other DNA
atccagttggcagcacagcc

SEQ ID NO: 2567 - DNA, 20 bp, synthetic construct
  source 1..20: mol_type = other DNA
atccacactccgaaagacac

SEQ ID NO: 2568 - DNA, 20 bp, synthetic construct
  source 1..20: mol_type = other DNA
atccaatggtaaatatttgg

SEQ ID NO: 2569 - DNA, 20 bp, synthetic construct
  source 1..20: mol_type = other DNA
atccaactggtggtcgggaa

SEQ ID NO: 2570 - DNA, 20 bp, synthetic construct
  source 1..20: mol_type = other DNA
atccaaaggttaccaaatat

SEQ ID NO: 2571 - DNA, 20 bp, synthetic construct
  source 1..20: mol_type = other DNA
atcaataggcctgttaatag

SEQ ID NO: 2572 - DNA, 20 bp, synthetic construct
  source 1..20: mol_type = other DNA
atatttggtaacctttggat

SEQ ID NO: 2573 - DNA, 20 bp, synthetic construct
  source 1..20: mol_type = other DNA
atatttgcgggagaggacaa

SEQ ID NO: 2574 - DNA, 20 bp, synthetic construct
  source 1..20: mol_type = other DNA
atatggtgacccacaaaatg

SEQ ID NO: 2575 - DNA, 20 bp, synthetic construct
  source 1..20: mol_type = other DNA
atatgggcctaaagttcagg

SEQ ID NO: 2576 - DNA, 20 bp, synthetic construct
  source 1..20: mol_type = other DNA
atatggatgatgtggtattg

SEQ ID NO: 2577 - DNA, 20 bp, synthetic construct
  source 1..20: mol_type = other DNA
atatacatcgtatccatggc

SEQ ID NO: 2578 - DNA, 21 bp, synthetic construct
  source 1..21: mol_type = other DNA
atataatatacccgccttcca

SEQ ID NO: 2579 - DNA, 21 bp, synthetic construct
  source 1..21: mol_type = other DNA
atagtccagaagaaccaacaa

SEQ ID NO: 2580 - DNA, 20 bp, synthetic construct
  source 1..20: mol_type = other DNA
atagtccagaagaaccaaca

SEQ ID NO: 2581 - DNA, 20 bp, synthetic construct
  source 1..20: mol_type = other DNA
ataggaattttccgaaagcc

SEQ ID NO: 2582 - DNA, 20 bp, synthetic construct
  source 1..20: mol_type = other DNA
atagcgcctcattttgtggg

SEQ ID NO: 2583 - DNA, 20 bp, synthetic construct
  source 1..20: mol_type = other DNA
atagcagcaggatgaagagg

SEQ ID NO: 2584 - DNA, 20 bp, synthetic construct
  source 1..20: mol_type = other DNA
atagagtatttggtgtcttt

SEQ ID NO: 2585 - DNA, 20 bp, synthetic construct
  source 1..20: mol_type = other DNA
atactacaaactttgccagc

SEQ ID NO: 2586 - DNA, 20 bp, synthetic construct
  source 1..20: mol_type = other DNA
atactaacattgaggttccc

SEQ ID NO: 2587 - DNA, 20 bp, synthetic construct
  source 1..20: mol_type = other DNA
atacgatgtatatttgcggg

SEQ ID NO: 2588 - DNA, 20 bp, synthetic construct
  source 1..20: mol_type = other DNA
ataccgcctcagctctgtat

SEQ ID NO: 2589 - DNA, 20 bp, synthetic construct
  source 1..20: mol_type = other DNA
atacatgcatacaagggcat

SEQ ID NO: 2590 - DNA, 21 bp, synthetic construct
  source 1..21: mol_type = other DNA
atacatagaggttccttgagc

SEQ ID NO: 2591 - DNA, 20 bp, synthetic construct
  source 1..20: mol_type = other DNA
atacatagaggttccttgag

SEQ ID NO: 2592 - DNA, 21 bp, synthetic construct
  source 1..21: mol_type = other DNA
atacaggtgcaatttccgtcc

SEQ ID NO: 2593 - DNA, 20 bp, synthetic construct
  source 1..20: mol_type = other DNA
atacaggtgcaatttccgtc

SEQ ID NO: 2594 - DNA, 20 bp, synthetic construct
  source 1..20: mol_type = other DNA
ataatatacccgccttccat

SEQ ID NO: 2595 - DNA, 20 bp, synthetic construct
  source 1..20: mol_type = other DNA
ataagggagaggcagtagtc

SEQ ID NO: 2596 - DNA, 20 bp, synthetic construct
  source 1..20: mol_type = other DNA
ataagagagaaacaacacat

SEQ ID NO: 2597 - DNA, 20 bp, synthetic construct
  source 1..20: mol_type = other DNA
ataactgactactaggtctc

SEQ ID NO: 2598 - DNA, 20 bp, synthetic construct
  source 1..20: mol_type = other DNA
ataactgaaagccaaacagt

SEQ ID NO: 2599 - DNA, 21 bp, synthetic construct
  source 1..21: mol_type = other DNA
ataactctgttgtcctctccc

SEQ ID NO: 2600 - DNA, 20 bp, synthetic construct
  source 1..20: mol_type = other DNA
ataactctgttgtcctctcc

SEQ ID NO: 2601 - DNA, 20 bp, synthetic construct
  source 1..20: mol_type = other DNA
ataaccacattgtgtaaatg

SEQ ID NO: 2602 - DNA, 20 bp, synthetic construct
  source 1..20: mol_type = other DNA
ataaattggtctgcgcacca

SEQ ID NO: 2603 - DNA, 21 bp, synthetic construct
  source 1..21: mol_type = other DNA
ataaagaatttggagctactg

SEQ ID NO: 2604 - DNA, 20 bp, synthetic construct
  source 1..20: mol_type = other DNA
agtttccggaagtgttgata

SEQ ID NO: 2605 - DNA, 20 bp, synthetic construct
  source 1..20: mol_type = other DNA
agttggcagcacagcctagc

SEQ ID NO: 2606 - DNA, 20 bp, synthetic construct
  source 1..20: mol_type = other DNA
agttgcatggtgctggtgcg

SEQ ID NO: 2607 - DNA, 20 bp, synthetic construct
  source 1..20: mol_type = other DNA
agttcttcttctaggggacc

SEQ ID NO: 2608 - DNA, 20 bp, synthetic construct
  source 1..20: mol_type = other DNA
agttccgcagtatggatcgg

SEQ ID NO: 2609 - DNA, 21 bp, synthetic construct
  source 1..21: mol_type = other DNA
agttccccctagaaaattgag

SEQ ID NO: 2610 - DNA, 20 bp, synthetic construct
  source 1..20: mol_type = other DNA
agttccccctagaaaattga

SEQ ID NO: 2611 - DNA, 20 bp, synthetic construct
  source 1..20: mol_type = other DNA
agttccccccagcaaagaat

SEQ ID NO: 2612 - DNA, 20 bp, synthetic construct
  source 1..20: mol_type = other DNA
agttccccaccttatgagtc

SEQ ID NO: 2613 - DNA, 20 bp, synthetic construct
  source 1..20: mol_type = other DNA
agttatgtcaacactaatat

SEQ ID NO: 2614 - DNA, 20 bp, synthetic construct
  source 1..20: mol_type = other DNA
agttatgggtccttgccaca

SEQ ID NO: 2615 - DNA, 20 bp, synthetic construct
  source 1..20: mol_type = other DNA
agttaatgagaaaagaagat

SEQ ID NO: 2616 - DNA, 21 bp, synthetic construct
  source 1..21: mol_type = other DNA
agtgttgataggataggggca

SEQ ID NO: 2617 - DNA, 20 bp, synthetic construct
  source 1..20: mol_type = other DNA
agtgtggattcgcactcctc

SEQ ID NO: 2618 - DNA, 20 bp, synthetic construct
  source 1..20: mol_type = other DNA
agtgtctagtttggaagtaa

SEQ ID NO: 2619 - DNA, 20 bp, synthetic construct
  source 1..20: mol_type = other DNA
agtgcgaatccacactccga

SEQ ID NO: 2620 - DNA, 20 bp, synthetic construct
  source 1..20: mol_type = other DNA
agtgcacacggtccggcaga

SEQ ID NO: 2621 - DNA, 21 bp, synthetic construct
  source 1..21: mol_type = other DNA
agtgattggaggttggggact

SEQ ID NO: 2622 - DNA, 20 bp, synthetic construct
  source 1..20: mol_type = other DNA
agtgattggaggttggggac

SEQ ID NO: 2623 - DNA, 20 bp, synthetic construct
  source 1..20: mol_type = other DNA
agtgaaagcctgcttagatt

SEQ ID NO: 2624 - DNA, 20 bp, synthetic construct
  source 1..20: mol_type = other DNA
agtctttgaagtatgcctca

SEQ ID NO: 2625 - DNA, 21 bp, synthetic construct
  source 1..21: mol_type = other DNA
agtctttaaacaaacagtctt

SEQ ID NO: 2626 - DNA, 20 bp, synthetic construct
  source 1..20: mol_type = other DNA
agtcctcttatgtaagacct

SEQ ID NO: 2627 - DNA, 20 bp, synthetic construct
  source 1..20: mol_type = other DNA
agtccgcgtaaagagaggtg

SEQ ID NO: 2628 - DNA, 20 bp, synthetic construct
  source 1..20: mol_type = other DNA
agtcccgataatgtttgctc

SEQ ID NO: 2629 - DNA, 20 bp, synthetic construct
  source 1..20: mol_type = other DNA
agtccccaacctccaatcac

SEQ ID NO: 2630 - DNA, 20 bp, synthetic construct
  source 1..20: mol_type = other DNA
agtcccaagcgaccccgaga

SEQ ID NO: 2631 - DNA, 20 bp, synthetic construct
  source 1..20: mol_type = other DNA
agtccagaagaaccaacaag

SEQ ID NO: 2632 - DNA, 20 bp, synthetic construct
  source 1..20: mol_type = other DNA
agtccaagagtcctcttatg

SEQ ID NO: 2633 - DNA, 21 bp, synthetic construct
  source 1..21: mol_type = other DNA
agtcattagttccccccagca

SEQ ID NO: 2634 - DNA, 20 bp, synthetic construct
  source 1..20: mol_type = other DNA
agtcattagttccccccagc

SEQ ID NO: 2635 - DNA, 21 bp, synthetic construct
  source 1..21: mol_type = other DNA
agtagtttccggaagtgttga

SEQ ID NO: 2636 - DNA, 20 bp, synthetic construct
  source 1..20: mol_type = other DNA
agtagtttccggaagtgttg

SEQ ID NO: 2637 - DNA, 20 bp, synthetic construct
  source 1..20: mol_type = other DNA
agtaggacatgaacaagaga

SEQ ID NO: 2638 - DNA, 20 bp, synthetic construct
  source 1..20: mol_type = other DNA
agtagctccaaattctttat

SEQ ID NO: 2639 - DNA, 20 bp, synthetic construct
  source 1..20: mol_type = other DNA
agtagaagaataaagaccag

SEQ ID NO: 2640 - DNA, 21 bp, synthetic construct
  source 1..21: mol_type = other DNA
agtaatgattaactagatgtt

SEQ ID NO: 2641 - DNA, 20 bp, synthetic construct
  source 1..20: mol_type = other DNA
agtaactccacagtagctcc

SEQ ID NO: 2642 - DNA, 20 bp, synthetic construct
  source 1..20: mol_type = other DNA
agtaaagttccccaccttat

SEQ ID NO: 2643 - DNA, 20 bp, synthetic construct
  source 1..20: mol_type = other DNA
aggttttatccaaaggttac

SEQ ID NO: 2644 - DNA, 20 bp, synthetic construct
  source 1..20: mol_type = other DNA
aggtttggtacagcaacagg

SEQ ID NO: 2645 - DNA, 20 bp, synthetic construct
  source 1..20: mol_type = other DNA
aggttggggactgcgaattt

SEQ ID NO: 2646 - DNA, 20 bp, synthetic construct
  source 1..20: mol_type = other DNA
aggttccacgcacgcgctga

SEQ ID NO: 2647 - DNA, 20 bp, synthetic construct
  source 1..20: mol_type = other DNA
aggttcaggtattgtttaca

SEQ ID NO: 2648 - DNA, 20 bp, synthetic construct
  source 1..20: mol_type = other DNA
aggtgtccttgttgggattg

SEQ ID NO: 2649 - DNA, 20 bp, synthetic construct
  source 1..20: mol_type = other DNA
aggtgcgccccgtggtcggt

SEQ ID NO: 2650 - DNA, 20 bp, synthetic construct
  source 1..20: mol_type = other DNA
aggtctggagcaaacattat

SEQ ID NO: 2651 - DNA, 20 bp, synthetic construct
  source 1..20: mol_type = other DNA
aggtctcaatcgccgcgtcg

SEQ ID NO: 2652 - DNA, 21 bp, synthetic construct
  source 1..21: mol_type = other DNA
aggtcggtcgttgacattgca

SEQ ID NO: 2653 - DNA, 20 bp, synthetic construct
  source 1..20: mol_type = other DNA
aggtcggtcgttgacattgc

SEQ ID NO: 2654 - DNA, 20 bp, synthetic construct
  source 1..20: mol_type = other DNA
aggtattgtttacacagaaa

SEQ ID NO: 2655 - DNA, 21 bp, synthetic construct
  source 1..21: mol_type = other DNA
aggtatgttgcccgtttgtcc

SEQ ID NO: 2656 - DNA, 20 bp, synthetic construct
  source 1..20: mol_type = other DNA
aggtaggagctggagcattc

SEQ ID NO: 2657 - DNA, 21 bp, synthetic construct
  source 1..21: mol_type = other DNA
aggtacagtagaagaataaag

SEQ ID NO: 2658 - DNA, 20 bp, synthetic construct
  source 1..20: mol_type = other DNA
agggtttactgctcctgaac

SEQ ID NO: 2659 - DNA, 20 bp, synthetic construct
  source 1..20: mol_type = other DNA
agggtttaaatgtataccca

SEQ ID NO: 2660 - DNA, 20 bp, synthetic construct
  source 1..20: mol_type = other DNA
agggtcgatgtccatgcccc

SEQ ID NO: 2661 - DNA, 20 bp, synthetic construct
  source 1..20: mol_type = other DNA
aggggcatttggtggtctat

SEQ ID NO: 2662 - DNA, 20 bp, synthetic construct
  source 1..20: mol_type = other DNA
aggggacctgcctcgtcgtc

SEQ ID NO: 2663 - DNA, 20 bp, synthetic construct
  source 1..20: mol_type = other DNA
agggctttcccccactgttt

SEQ ID NO: 2664 - DNA, 20 bp, synthetic construct
  source 1..20: mol_type = other DNA
agggatacatagaggttcct

SEQ ID NO: 2665 - DNA, 21 bp, synthetic construct
  source 1..21: mol_type = other DNA
agggagaggcagtagtcggaa

SEQ ID NO: 2666 - DNA, 20 bp, synthetic construct
  source 1..20: mol_type = other DNA
agggactcaagatgctgtac

SEQ ID NO: 2667 - DNA, 20 bp, synthetic construct
  source 1..20: mol_type = other DNA
aggcttgaacagtaggacat

SEQ ID NO: 2668 - DNA, 20 bp, synthetic construct
  source 1..20: mol_type = other DNA
aggcttcccgatacagagct

SEQ ID NO: 2669 - DNA, 21 bp, synthetic construct
  source 1..21: mol_type = other DNA
aggctgccttcctgtctggcg

SEQ ID NO: 2670 - DNA, 20 bp, synthetic construct
  source 1..20: mol_type = other DNA
aggcgggtatattatataag

SEQ ID NO: 2671 - DNA, 20 bp, synthetic construct
  source 1..20: mol_type = other DNA
aggcgagggagttcttcttc

SEQ ID NO: 2672 - DNA, 20 bp, synthetic construct
  source 1..20: mol_type = other DNA
aggccttgtaagttggcgag

SEQ ID NO: 2673 - DNA, 20 bp, synthetic construct
  source 1..20: mol_type = other DNA
aggcctccgtgcggtggggt

SEQ ID NO: 2674 - DNA, 20 bp, synthetic construct
  source 1..20: mol_type = other DNA
aggcccacttacagttaatg

SEQ ID NO: 2675 - DNA, 20 bp, synthetic construct
  source 1..20: mol_type = other DNA
aggcatagcagcaggatgaa

SEQ ID NO: 2676 - DNA, 20 bp, synthetic construct
  source 1..20: mol_type = other DNA
aggcaggtcccctagaagaa

SEQ ID NO: 2677 - DNA, 20 bp, synthetic construct
  source 1..20: mol_type = other DNA
aggcaggaggcggatttgct

SEQ ID NO: 2678 - DNA, 21 bp, synthetic construct
  source 1..21: mol_type = other DNA
aggcaaaaacgagagtaactc

SEQ ID NO: 2679 - DNA, 20 bp, synthetic construct
  source 1..20: mol_type = other DNA
aggattggggaccctgcgct

SEQ ID NO: 2680 - DNA, 20 bp, synthetic construct
  source 1..20: mol_type = other DNA
aggattcttgtcaacaagaa

SEQ ID NO: 2681 - DNA, 20 bp, synthetic construct
  source 1..20: mol_type = other DNA
aggattaaagacaggtacag

SEQ ID NO: 2682 - DNA, 20 bp, synthetic construct
  source 1..20: mol_type = other DNA
aggatgatgggatgggaata

SEQ ID NO: 2683 - DNA, 20 bp, synthetic construct
  source 1..20: mol_type = other DNA
aggatgaagaggaagatgat

SEQ ID NO: 2684 - DNA, 20 bp, synthetic construct
  source 1..20: mol_type = other DNA
aggatcctggaattagagga

SEQ ID NO: 2685 - DNA, 20 bp, synthetic construct
  source 1..20: mol_type = other DNA
aggatcctcaaccaccagca

SEQ ID NO: 2686 - DNA, 20 bp, synthetic construct
  source 1..20: mol_type = other DNA
aggagttgggggaggagatt

SEQ ID NO: 2687 - DNA, 20 bp, synthetic construct
  source 1..20: mol_type = other DNA
aggagtgcgaatccacactc

SEQ ID NO: 2688 - DNA, 20 bp, synthetic construct
  source 1..20: mol_type = other DNA
aggaggttggtgagtgattg

SEQ ID NO: 2689 - DNA, 20 bp, synthetic construct
  source 1..20: mol_type = other DNA
aggaggcggatttgctggca

SEQ ID NO: 2690 - DNA, 20 bp, synthetic construct
  source 1..20: mol_type = other DNA
aggagctggagcattcgggc

SEQ ID NO: 2691 - DNA, 20 bp, synthetic construct
  source 1..20: mol_type = other DNA
aggagcagtaaaccctgttc

SEQ ID NO: 2692 - DNA, 20 bp, synthetic construct
  source 1..20: mol_type = other DNA
aggacgtcccgcgcaggatc

SEQ ID NO: 2693 - DNA, 20 bp, synthetic construct
  source 1..20: mol_type = other DNA
aggaccccttctcgtgttac

SEQ ID NO: 2694 - DNA, 20 bp, synthetic construct
  source 1..20: mol_type = other DNA
aggacaagttggaggacagg

SEQ ID NO: 2695 - DNA, 21 bp, synthetic construct
  source 1..21: mol_type = other DNA
aggaattttccgaaagcccag

SEQ ID NO: 2696 - DNA, 20 bp, synthetic construct
  source 1..20: mol_type = other DNA
aggaattttccgaaagccca

SEQ ID NO: 2697 - DNA, 21 bp, synthetic construct
  source 1..21: mol_type = other DNA
aggaagttttctaaaacattc

SEQ ID NO: 2698 - DNA, 20 bp, synthetic construct
  source 1..20: mol_type = other DNA
aggaagatgataaaacgccg

SEQ ID NO: 2699 - DNA, 20 bp, synthetic construct
  source 1..20: mol_type = other DNA
aggaaagaagtcagaaggca

SEQ ID NO: 2700 - DNA, 20 bp, synthetic construct
  source 1..20: mol_type = other DNA
agcttggaggcttgaacagt

SEQ ID NO: 2701 - DNA, 20 bp, synthetic construct
  source 1..20: mol_type = other DNA
agctgtgccttgggtggctt

SEQ ID NO: 2702 - DNA, 20 bp, synthetic construct
  source 1..20: mol_type = other DNA
agctctgtatcgggaagcct

SEQ ID NO: 2703 - DNA, 21 bp, synthetic construct
  source 1..21: mol_type = other DNA
agctccaaattctttataagg

SEQ ID NO: 2704 - DNA, 21 bp, synthetic construct
  source 1..21: mol_type = other DNA
agcggctaggagttccgcagt

SEQ ID NO: 2705 - DNA, 20 bp, synthetic construct
  source 1..20: mol_type = other DNA
agcgccgacgggacgtaaac

SEQ ID NO: 2706 - DNA, 20 bp, synthetic construct
  source 1..20: mol_type = other DNA
agcgcagggtccccaatcct

SEQ ID NO: 2707 - DNA, 20 bp, synthetic construct
  source 1..20: mol_type = other DNA
agcgataaccaggacaagtt

SEQ ID NO: 2708 - DNA, 20 bp, synthetic construct
  source 1..20: mol_type = other DNA
agccttcagagcaaacacag

SEQ ID NO: 2709 - DNA, 20 bp, synthetic construct
  source 1..20: mol_type = other DNA
agcctgagggctccacccca

SEQ ID NO: 2710 - DNA, 20 bp, synthetic construct
  source 1..20: mol_type = other DNA
agccgaaaaggttccacgca

SEQ ID NO: 2711 - DNA, 20 bp, synthetic construct
  source 1..20: mol_type = other DNA
agccctacgaaccactgaac

SEQ ID NO: 2712 - DNA, 20 bp, synthetic construct
  source 1..20: mol_type = other DNA
agcccaggatgatgggatgg

SEQ ID NO: 2713 - DNA, 20 bp, synthetic construct
  source 1..20: mol_type = other DNA
agccaggagaaacgggctga

SEQ ID NO: 2714 - DNA, 20 bp, synthetic construct
  source 1..20: mol_type = other DNA
agcagtagtcatgcaggttc

SEQ ID NO: 2715 - DNA, 21 bp, synthetic construct
  source 1..21: mol_type = other DNA
agcaattctttgctgggggga

SEQ ID NO: 2716 - DNA, 20 bp, synthetic construct
  source 1..20: mol_type = other DNA
agcaacaggagggatacata

SEQ ID NO: 2717 - DNA, 20 bp, synthetic construct
  source 1..20: mol_type = other DNA
agcaaatccgcctcctgcct

SEQ ID NO: 2718 - DNA, 20 bp, synthetic construct
  source 1..20: mol_type = other DNA
agcaaaacccaaaagaccca

SEQ ID NO: 2719 - DNA, 20 bp, synthetic construct
  source 1..20: mol_type = other DNA
agattgcaattgattatgcc

SEQ ID NO: 2720 - DNA, 20 bp, synthetic construct
  source 1..20: mol_type = other DNA
agattgaatacatgcataca

SEQ ID NO: 2721 - DNA, 20 bp, synthetic construct
  source 1..20: mol_type = other DNA
agattaaaggtctttgtact

SEQ ID NO: 2722 - DNA, 21 bp, synthetic construct
  source 1..21: mol_type = other DNA
agatgctgtacagacttggcc

SEQ ID NO: 2723 - DNA, 20 bp, synthetic construct
  source 1..20: mol_type = other DNA
agatgctggatcttccaaat

SEQ ID NO: 2724 - DNA, 20 bp, synthetic construct
  source 1..20: mol_type = other DNA
agatgattaggcagaggtga

SEQ ID NO: 2725 - DNA, 20 bp, synthetic construct
  source 1..20: mol_type = other DNA
agatgagaaggcacagacgg

SEQ ID NO: 2726 - DNA, 20 bp, synthetic construct
  source 1..20: mol_type = other DNA
agatcttgttcccaagaata

SEQ ID NO: 2727 - DNA, 20 bp, synthetic construct
  source 1..20: mol_type = other DNA
agatcttctagataccgcct

SEQ ID NO: 2728 - DNA, 20 bp, synthetic construct
  source 1..20: mol_type = other DNA
agatctcgtactgaaggaaa

SEQ ID NO: 2729 - DNA, 21 bp, synthetic construct
  source 1..21: mol_type = other DNA
agatccagcatctagagacct

SEQ ID NO: 2730 - DNA, 20 bp, synthetic construct
  source 1..20: mol_type = other DNA
agatccagcatctagagacc

SEQ ID NO: 2731 - DNA, 20 bp, synthetic construct
  source 1..20: mol_type = other DNA
agagtttggtgaaaggttgt

SEQ ID NO: 2732 - DNA, 21 bp, synthetic construct
  source 1..21: mol_type = other DNA
agagtcccaagcgaccccgag

SEQ ID NO: 2733 - DNA, 20 bp, synthetic construct
  source 1..20: mol_type = other DNA
agagtcccaagcgaccccga

SEQ ID NO: 2734 - DNA, 20 bp, synthetic construct
  source 1..20: mol_type = other DNA
agagtatttggtgtctttcg

SEQ ID NO: 2735 - DNA, 20 bp, synthetic construct
  source 1..20: mol_type = other DNA
agaggcctgtatttccctgc

SEQ ID NO: 2736 - DNA, 20 bp, synthetic construct
  source 1..20: mol_type = other DNA
agaggaagatgataaaacgc

SEQ ID NO: 2737 - DNA, 20 bp, synthetic construct
  source 1..20: mol_type = other DNA
agagctgaggcggtatctag

SEQ ID NO: 2738 - DNA, 20 bp, synthetic construct
  source 1..20: mol_type = other DNA
agagcaaacacagcaaatcc

SEQ ID NO: 2739 - DNA, 20 bp, synthetic construct
  source 1..20: mol_type = other DNA
agagatgattaggcagaggt

SEQ ID NO: 2740 - DNA, 20 bp, synthetic construct
  source 1..20: mol_type = other DNA
agagagtcccaagcgacccc

SEQ ID NO: 2741 - DNA, 20 bp, synthetic construct
  source 1..20: mol_type = other DNA
agagaggtgcgccccgtggt

SEQ ID NO: 2742 - DNA, 20 bp, synthetic construct
  source 1..20: mol_type = other DNA
agagaagtccaccacgagtc

SEQ ID NO: 2743 - DNA, 20 bp, synthetic construct
  source 1..20: mol_type = other DNA
agactgtttgtttaaagact

SEQ ID NO: 2744 - DNA, 21 bp, synthetic construct
  source 1..21: mol_type = other DNA
agactgggaggagttggggga

SEQ ID NO: 2745 - DNA, 20 bp, synthetic construct
  source 1..20: mol_type = other DNA
agactgggaggagttggggg

SEQ ID NO: 2746 - DNA, 21 bp, synthetic construct
  source 1..21: mol_type = other DNA
agacggggagtccgcgtaaag

SEQ ID NO: 2747 - DNA, 20 bp, synthetic construct
  source 1..20: mol_type = other DNA
agacggggagtccgcgtaaa

SEQ ID NO: 2748 - DNA, 20 bp, synthetic construct
  source 1..20: mol_type = other DNA
agacggagaaggggacgaga

SEQ ID NO: 2749 - DNA, 20 bp, synthetic construct
  source 1..20: mol_type = other DNA
agacgacgaggcaggtcccc

SEQ ID NO: 2750 - DNA, 20 bp, synthetic construct
  source 1..20: mol_type = other DNA
agaccttgggcaacattcgg

SEQ ID NO: 2751 - DNA, 21 bp, synthetic construct
  source 1..21: mol_type = other DNA
agaccttcgtctgcgaggcga

SEQ ID NO: 2752 - DNA, 20 bp, synthetic construct
  source 1..20: mol_type = other DNA
agaccttcgtctgcgaggcg

SEQ ID NO: 2753 - DNA, 20 bp, synthetic construct
  source 1..20: mol_type = other DNA
agacctgctgcgagcaaaac

SEQ ID NO: 2754 - DNA, 20 bp, synthetic construct
  source 1..20: mol_type = other DNA
agaccaccgtgaacgcccac

SEQ ID NO: 2755 - DNA, 20 bp, synthetic construct
  source 1..20: mol_type = other DNA
agacaggtacagtagaagaa

SEQ ID NO: 2756 - DNA, 20 bp, synthetic construct
  source 1..20: mol_type = other DNA
agacaccaaatactctataa

SEQ ID NO: 2757 - DNA, 20 bp, synthetic construct
  source 1..20: mol_type = other DNA
agacacatccagcgataacc

SEQ ID NO: 2758 - DNA, 20 bp, synthetic construct
  source 1..20: mol_type = other DNA
agacacacggtagttccccc

SEQ ID NO: 2759 - DNA, 21 bp, synthetic construct
  source 1..21: mol_type = other DNA
agacaagaaatgtgaaaccac

SEQ ID NO: 2760 - DNA, 20 bp, synthetic construct
  source 1..20: mol_type = other DNA
agacaagaaatgtgaaacca

SEQ ID NO: 2761 - DNA, 21 bp, synthetic construct
  source 1..21: mol_type = other DNA
agacaaaagaaaattggtaac

SEQ ID NO: 2762 - DNA, 20 bp, synthetic construct
  source 1..20: mol_type = other DNA
agacaaaagaaaattggtaa

SEQ ID NO: 2763 - DNA, 20 bp, synthetic construct
  source 1..20: mol_type = other DNA
agaatcctcacaataccgca

SEQ ID NO: 2764 - DNA, 20 bp, synthetic construct
  source 1..20: mol_type = other DNA
agaagtcagaaggcaaaaac

SEQ ID NO: 2765 - DNA, 20 bp, synthetic construct
  source 1..20: mol_type = other DNA
agaaggggtcctaggaatcc

SEQ ID NO: 2766 - DNA, 20 bp, synthetic construct
  source 1..20: mol_type = other DNA
agaaggggacgagagagtcc

SEQ ID NO: 2767 - DNA, 20 bp, synthetic construct
  source 1..20: mol_type = other DNA
agaagattgacgataaggga

SEQ ID NO: 2768 - DNA, 20 bp, synthetic construct
  source 1..20: mol_type = other DNA
agaagatgaggcatagcagc

SEQ ID NO: 2769 - DNA, 20 bp, synthetic construct
  source 1..20: mol_type = other DNA
agaagatctcgtactgaagg

SEQ ID NO: 2770 - DNA, 20 bp, synthetic construct
  source 1..20: mol_type = other DNA
agaagaactccctcgcctcg

SEQ ID NO: 2771 - DNA, 20 bp, synthetic construct
  source 1..20: mol_type = other DNA
agaagaaccaacaagaagat

SEQ ID NO: 2772 - DNA, 20 bp, synthetic construct
  source 1..20: mol_type = other DNA
agaacatcacatcaggattc

SEQ ID NO: 2773 - DNA, 20 bp, synthetic construct
  source 1..20: mol_type = other DNA
agaaaggccttgtaagttgg

SEQ ID NO: 2774 - DNA, 20 bp, synthetic construct
  source 1..20: mol_type = other DNA
agaaaccgttatagagtatt

SEQ ID NO: 2775 - DNA, 20 bp, synthetic construct
  source 1..20: mol_type = other DNA
agaaaattggtaacagcggt

SEQ ID NO: 2776 - DNA, 20 bp, synthetic construct
  source 1..20: mol_type = other DNA
actttctcgccaacttacaa

SEQ ID NO: 2777 - DNA, 20 bp, synthetic construct
  source 1..20: mol_type = other DNA
acttctctcaattttctagg

SEQ ID NO: 2778 - DNA, 20 bp, synthetic construct
  source 1..20: mol_type = other DNA
acttccaatgacataaccca

SEQ ID NO: 2779 - DNA, 20 bp, synthetic construct
  source 1..20: mol_type = other DNA
acttcaaagactgtttgttt

SEQ ID NO: 2780 - DNA, 20 bp, synthetic construct
  source 1..20: mol_type = other DNA
acttacagttaatgagaaaa

SEQ ID NO: 2781 - DNA, 20 bp, synthetic construct
  source 1..20: mol_type = other DNA
acttacaaggcctttctgtg

SEQ ID NO: 2782 - DNA, 21 bp, synthetic construct
  source 1..21: mol_type = other DNA
actgtttgtttaaagactggg

SEQ ID NO: 2783 - DNA, 20 bp, synthetic construct
  source 1..20: mol_type = other DNA
actgtttgtttaaagactgg

SEQ ID NO: 2784 - DNA, 20 bp, synthetic construct
  source 1..20: mol_type = other DNA
actgttgttagacgacgagg

SEQ ID NO: 2785 - DNA, 20 bp, synthetic construct
  source 1..20: mol_type = other DNA
actgggaggagttgggggag

SEQ ID NO: 2786 - DNA, 20 bp, synthetic construct
  source 1..20: mol_type = other DNA
actggctggggcttggtcat

SEQ ID NO: 2787 - DNA, 20 bp, synthetic construct
  source 1..20: mol_type = other DNA
actgaaggaaagaagtcaga

SEQ ID NO: 2788 - DNA, 20 bp, synthetic construct
  source 1..20: mol_type = other DNA
actgaacaaatggcactagt

SEQ ID NO: 2789 - DNA, 20 bp, synthetic construct
  source 1..20: mol_type = other DNA
actgaaagccaaacagtggg

SEQ ID NO: 2790 - DNA, 20 bp, synthetic construct
  source 1..20: mol_type = other DNA
actctgttgtcctctcccgc

SEQ ID NO: 2791 - DNA, 20 bp, synthetic construct
  source 1..20: mol_type = other DNA
actctgcaagatcccagagt

SEQ ID NO: 2792 - DNA, 21 bp, synthetic construct
  source 1..21: mol_type = other DNA
actctagctacctgggtgggt

SEQ ID NO: 2793 - DNA, 20 bp, synthetic construct
  source 1..20: mol_type = other DNA
actctaaggcttcccgatac

SEQ ID NO: 2794 - DNA, 20 bp, synthetic construct
  source 1..20: mol_type = other DNA
actcctcccagtctttaaac

SEQ ID NO: 2795 - DNA, 21 bp, synthetic construct
  source 1..21: mol_type = other DNA
actcctccagcttatagacca

SEQ ID NO: 2796 - DNA, 20 bp, synthetic construct
  source 1..20: mol_type = other DNA
actccctcgcctcgcagacg

SEQ ID NO: 2797 - DNA, 20 bp, synthetic construct
  source 1..20: mol_type = other DNA
actcccataggaattttccg

SEQ ID NO: 2798 - DNA, 21 bp, synthetic construct
  source 1..21: mol_type = other DNA
actcataaggtggggaacttt

SEQ ID NO: 2799 - DNA, 20 bp, synthetic construct
  source 1..20: mol_type = other DNA
actatttacacactctatgg

SEQ ID NO: 2800 - DNA, 20 bp, synthetic construct
  source 1..20: mol_type = other DNA
actagtaaactgagccagga

SEQ ID NO: 2801 - DNA, 21 bp, synthetic construct
  source 1..21: mol_type = other DNA
actaggaggctgtaggcataa

SEQ ID NO: 2802 - DNA, 20 bp, synthetic construct
  source 1..20: mol_type = other DNA
actagatgttctggataata

SEQ ID NO: 2803 - DNA, 20 bp, synthetic construct
  source 1..20: mol_type = other DNA
actactgttgttagacgacg

SEQ ID NO: 2804 - DNA, 20 bp, synthetic construct
  source 1..20: mol_type = other DNA
actactaggtctctagatgc

SEQ ID NO: 2805 - DNA, 20 bp, synthetic construct
  source 1..20: mol_type = other DNA
actaccgtgtgtcttggcca

SEQ ID NO: 2806 - DNA, 20 bp, synthetic construct
  source 1..20: mol_type = other DNA
actaatgactctagctacct

SEQ ID NO: 2807 - DNA, 20 bp, synthetic construct
  source 1..20: mol_type = other DNA
actaatatgggcctaaagtt

SEQ ID NO: 2808 - DNA, 20 bp, synthetic construct
  source 1..20: mol_type = other DNA
acgtcgcatggagaccaccg

SEQ ID NO: 2809 - DNA, 20 bp, synthetic construct
  source 1..20: mol_type = other DNA
acggtttctcttccaaaagt

SEQ ID NO: 2810 - DNA, 20 bp, synthetic construct
  source 1..20: mol_type = other DNA
acggtggtctccatgcgacg

SEQ ID NO: 2811 - DNA, 20 bp, synthetic construct
  source 1..20: mol_type = other DNA
acggggcgcacctctcttta

SEQ ID NO: 2812 - DNA, 20 bp, synthetic construct
  source 1..20: mol_type = other DNA
acggggagtccgcgtaaaga

SEQ ID NO: 2813 - DNA, 20 bp, synthetic construct
  source 1..20: mol_type = other DNA
acgggctgaggcccactccc

SEQ ID NO: 2814 - DNA, 20 bp, synthetic construct
  source 1..20: mol_type = other DNA
acggcagacggagaagggga

SEQ ID NO: 2815 - DNA, 20 bp, synthetic construct
  source 1..20: mol_type = other DNA
acggaggccttttggggtgg

SEQ ID NO: 2816 - DNA, 20 bp, synthetic construct
  source 1..20: mol_type = other DNA
acgcgctgatggcccatgac

SEQ ID NO: 2817 - DNA, 20 bp, synthetic construct
  source 1..20: mol_type = other DNA
acgcccaccgaatgttgccc

SEQ ID NO: 2818 - DNA, 20 bp, synthetic construct
  source 1..20: mol_type = other DNA
acgcacgcgctgatggccca

SEQ ID NO: 2819 - DNA, 20 bp, synthetic construct
  source 1..20: mol_type = other DNA
acgcaacccccactggctgg

SEQ ID NO: 2820 - DNA, 20 bp, synthetic construct
  source 1..20: mol_type = other DNA
acgatgtatatttgcgggag

SEQ ID NO: 2821 - DNA, 20 bp, synthetic construct
  source 1..20: mol_type = other DNA
acgaggcaggtcccctagaa

SEQ ID NO: 2822 - DNA, 21 bp, synthetic construct
  source 1..21: mol_type = other DNA
acgagaaggggtcctaggaat

SEQ ID NO: 2823 - DNA, 20 bp, synthetic construct
  source 1..20: mol_type = other DNA
acgacgaggcaggtccccta

SEQ ID NO: 2824 - DNA, 20 bp, synthetic construct
  source 1..20: mol_type = other DNA
acctttggataaaacctagc

SEQ ID NO: 2825 - DNA, 20 bp, synthetic construct
  source 1..20: mol_type = other DNA
acctttcaccaaactctgca

SEQ ID NO: 2826 - DNA, 20 bp, synthetic construct
  source 1..20: mol_type = other DNA
acctttaccccgttgcccgg

SEQ ID NO: 2827 - DNA, 20 bp, synthetic construct
  source 1..20: mol_type = other DNA
accttgggcaacattcggtg

SEQ ID NO: 2828 - DNA, 20 bp, synthetic construct
  source 1..20: mol_type = other DNA
accttcgtctgcgaggcgag

SEQ ID NO: 2829 - DNA, 20 bp, synthetic construct
  source 1..20: mol_type = other DNA
accttattatccagaacatc

SEQ ID NO: 2830 - DNA, 20 bp, synthetic construct
  source 1..20: mol_type = other DNA
acctgtctttaatcctcatt

SEQ ID NO: 2831 - DNA, 21 bp, synthetic construct
  source 1..21: mol_type = other DNA
acctgggtgggtgttaatttg

SEQ ID NO: 2832 - DNA, 20 bp, synthetic construct
  source 1..20: mol_type = other DNA
acctgggtgggtgttaattt

SEQ ID NO: 2833 - DNA, 20 bp, synthetic construct
  source 1..20: mol_type = other DNA
acctggccgttgccgggcaa

SEQ ID NO: 2834 - DNA, 20 bp, synthetic construct
  source 1..20: mol_type = other DNA
acctgcatgactactgctca

SEQ ID NO: 2835 - DNA, 21 bp, synthetic construct
  source 1..21: mol_type = other DNA
acctcctgtcctccaacttgt

SEQ ID NO: 2836 - DNA, 20 bp, synthetic construct
  source 1..20: mol_type = other DNA
acctcaccatactgcactca

SEQ ID NO: 2837 - DNA, 20 bp, synthetic construct
  source 1..20: mol_type = other DNA
acctcaatgttagtattcct

SEQ ID NO: 2838 - DNA, 20 bp, synthetic construct
  source 1..20: mol_type = other DNA
acctagcaggcataatcaat

SEQ ID NO: 2839 - DNA, 20 bp, synthetic construct
  source 1..20: mol_type = other DNA
accgcctcagctctgtatcg

SEQ ID NO: 2840 - DNA, 20 bp, synthetic construct
  source 1..20: mol_type = other DNA
accgaccttgaggcatactt

SEQ ID NO: 2841 - DNA, 20 bp, synthetic construct
  source 1..20: mol_type = other DNA
acccttctcggggtcgcttg

SEQ ID NO: 2842 - DNA, 21 bp, synthetic construct
  source 1..21: mol_type = other DNA
acccttatccaatggtaaata

SEQ ID NO: 2843 - DNA, 20 bp, synthetic construct
  source 1..20: mol_type = other DNA
accctaacaaaacaaagaga

SEQ ID NO: 2844 - DNA, 20 bp, synthetic construct
  source 1..20: mol_type = other DNA
accccttctcgtgttacagg

SEQ ID NO: 2845 - DNA, 20 bp, synthetic construct
  source 1..20: mol_type = other DNA
accccgctgtctccaccttt

SEQ ID NO: 2846 - DNA, 20 bp, synthetic construct
  source 1..20: mol_type = other DNA
accccgcctgtaacacgaga

SEQ ID NO: 2847 - DNA, 20 bp, synthetic construct
  source 1..20: mol_type = other DNA
accccgagaagggtcgtccg

SEQ ID NO: 2848 - DNA, 20 bp, synthetic construct
  source 1..20: mol_type = other DNA
acccataacttccaatgaca

SEQ ID NO: 2849 - DNA, 20 bp, synthetic construct
  source 1..20: mol_type = other DNA
acccaggtagctagagtcat

SEQ ID NO: 2850 - DNA, 20 bp, synthetic construct
  source 1..20: mol_type = other DNA
acccaaagacaaaagaaaat

SEQ ID NO: 2851 - DNA, 20 bp, synthetic construct
  source 1..20: mol_type = other DNA
accagttggatccagccttc

SEQ ID NO: 2852 - DNA, 21 bp, synthetic construct
  source 1..21: mol_type = other DNA
accagtaaagttccccacctt

SEQ ID NO: 2853 - DNA, 20 bp, synthetic construct
  source 1..20: mol_type = other DNA
accacattgtgtaaatgggg

SEQ ID NO: 2854 - DNA, 20 bp, synthetic construct
  source 1..20: mol_type = other DNA
accacatcatccatataact

SEQ ID NO: 2855 - DNA, 20 bp, synthetic construct
  source 1..20: mol_type = other DNA
accaattttcttttgtcttt

SEQ ID NO: 2856 - DNA, 20 bp, synthetic construct
  source 1..20: mol_type = other DNA
accaacaagaagatgaggca

SEQ ID NO: 2857 - DNA, 20 bp, synthetic construct
  source 1..20: mol_type = other DNA
accaaatgcccctatcctat

SEQ ID NO: 2858 - DNA, 21 bp, synthetic construct
  source 1..21: mol_type = other DNA
accaaatatttaccattggat

SEQ ID NO: 2859 - DNA, 20 bp, synthetic construct
  source 1..20: mol_type = other DNA
accaaatatttaccattgga

SEQ ID NO: 2860 - DNA, 20 bp, synthetic construct
  source 1..20: mol_type = other DNA
accaaactctgcaagatccc

SEQ ID NO: 2861 - DNA, 20 bp, synthetic construct
  source 1..20: mol_type = other DNA
acatttcttgtctcactttt

SEQ ID NO: 2862 - DNA, 20 bp, synthetic construct
  source 1..20: mol_type = other DNA
acatttaaaccctaacaaaa

SEQ ID NO: 2863 - DNA, 20 bp, synthetic construct
  source 1..20: mol_type = other DNA
acattgtgtaaatggggcag

SEQ ID NO: 2864 - DNA, 20 bp, synthetic construct
  source 1..20: mol_type = other DNA
acattgaggttcccgagatt

SEQ ID NO: 2865 - DNA, 20 bp, synthetic construct
  source 1..20: mol_type = other DNA
acattctttgattttttgta

SEQ ID NO: 2866 - DNA, 20 bp, synthetic construct
  source 1..20: mol_type = other DNA
acattatcaaaaaatgtgaa

SEQ ID NO: 2867 - DNA, 20 bp, synthetic construct
  source 1..20: mol_type = other DNA
acatggagaacatcacatca

SEQ ID NO: 2868 - DNA, 20 bp, synthetic construct
  source 1..20: mol_type = other DNA
acatgaacaagagatgatta

SEQ ID NO: 2869 - DNA, 20 bp, synthetic construct
  source 1..20: mol_type = other DNA
acatcgtatccatggctgct

SEQ ID NO: 2870 - DNA, 20 bp, synthetic construct
  source 1..20: mol_type = other DNA
acatccagcgataaccagga

SEQ ID NO: 2871 - DNA, 20 bp, synthetic construct
  source 1..20: mol_type = other DNA
acatcatccatataactgaa

SEQ ID NO: 2872 - DNA, 20 bp, synthetic construct
  source 1..20: mol_type = other DNA
acatcatacaaaaaatcaaa

SEQ ID NO: 2873 - DNA, 20 bp, synthetic construct
  source 1..20: mol_type = other DNA
acatcacatcaggattccta

SEQ ID NO: 2874 - DNA, 20 bp, synthetic construct
  source 1..20: mol_type = other DNA
acataccttgatagtccaga

SEQ ID NO: 2875 - DNA, 21 bp, synthetic construct
  source 1..21: mol_type = other DNA
acataactgactactaggtct

SEQ ID NO: 2876 - DNA, 20 bp, synthetic construct
  source 1..20: mol_type = other DNA
acataacccataaaattcag

SEQ ID NO: 2877 - DNA, 20 bp, synthetic construct
  source 1..20: mol_type = other DNA
acagtttgtaggcccactta

SEQ ID NO: 2878 - DNA, 20 bp, synthetic construct
  source 1..20: mol_type = other DNA
acagtgggggaaagccctac

SEQ ID NO: 2879 - DNA, 20 bp, synthetic construct
  source 1..20: mol_type = other DNA
acagtctttgaagtatgcct

SEQ ID NO: 2880 - DNA, 20 bp, synthetic construct
  source 1..20: mol_type = other DNA
acagtagtttccggaagtgt

SEQ ID NO: 2881 - DNA, 20 bp, synthetic construct
  source 1..20: mol_type = other DNA
acaggtgcaatttccgtccg

SEQ ID NO: 2882 - DNA, 20 bp, synthetic construct
  source 1..20: mol_type = other DNA
acaggtacagtagaagaata

SEQ ID NO: 2883 - DNA, 21 bp, synthetic construct
  source 1..21: mol_type = other DNA
acaggaggttggtgagtgatt

SEQ ID NO: 2884 - DNA, 20 bp, synthetic construct
  source 1..20: mol_type = other DNA
acaggaggttggtgagtgat

SEQ ID NO: 2885 - DNA, 20 bp, synthetic construct
  source 1..20: mol_type = other DNA
acagcttggaggcttgaaca

SEQ ID NO: 2886 - DNA, 20 bp, synthetic construct
  source 1..20: mol_type = other DNA
acagcggtaaaaagggactc

SEQ ID NO: 2887 - DNA, 21 bp, synthetic construct
  source 1..21: mol_type = other DNA
acagcaacaggagggatacat

SEQ ID NO: 2888 - DNA, 20 bp, synthetic construct
  source 1..20: mol_type = other DNA
acagcaacaggagggataca

SEQ ID NO: 2889 - DNA, 21 bp, synthetic construct
  source 1..21: mol_type = other DNA
acagcaaatccagattgggac

SEQ ID NO: 2890 - DNA, 21 bp, synthetic construct
  source 1..21: mol_type = other DNA
acagagctgaggcggtatcta

SEQ ID NO: 2891 - DNA, 20 bp, synthetic construct
  source 1..20: mol_type = other DNA
acagagctgaggcggtatct

SEQ ID NO: 2892 - DNA, 20 bp, synthetic construct
  source 1..20: mol_type = other DNA
acagacggggagtccgcgta

SEQ ID NO: 2893 - DNA, 20 bp, synthetic construct
  source 1..20: mol_type = other DNA
acagaaaggccttgtaagtt

SEQ ID NO: 2894 - DNA, 20 bp, synthetic construct
  source 1..20: mol_type = other DNA
acactcatcctcaggccatg

SEQ ID NO: 2895 - DNA, 20 bp, synthetic construct
  source 1..20: mol_type = other DNA
acactatttacacactctat

SEQ ID NO: 2896 - DNA, 20 bp, synthetic construct
  source 1..20: mol_type = other DNA
acacggtccggcagatgaga

SEQ ID NO: 2897 - DNA, 20 bp, synthetic construct
  source 1..20: mol_type = other DNA
acacggtagttccccctaga

SEQ ID NO: 2898 - DNA, 20 bp, synthetic construct
  source 1..20: mol_type = other DNA
acacctggccagacgccaac

SEQ ID NO: 2899 - DNA, 20 bp, synthetic construct
  source 1..20: mol_type = other DNA
acacatcatacaaaaaatca

SEQ ID NO: 2900 - DNA, 20 bp, synthetic construct
  source 1..20: mol_type = other DNA
acacatagcgcctcattttg

SEQ ID NO: 2901 - DNA, 20 bp, synthetic construct
  source 1..20: mol_type = other DNA
acacacggtagttcccccta

SEQ ID NO: 2902 - DNA, 20 bp, synthetic construct
  source 1..20: mol_type = other DNA
acaatgtggttatcctgcgt

SEQ ID NO: 2903 - DNA, 20 bp, synthetic construct
  source 1..20: mol_type = other DNA
acaatgctcaggagactcta

SEQ ID NO: 2904 - DNA, 20 bp, synthetic construct
  source 1..20: mol_type = other DNA
acaagggcattaacgcagga

SEQ ID NO: 2905 - DNA, 20 bp, synthetic construct
  source 1..20: mol_type = other DNA
acaaggcctttctgtgtaaa

SEQ ID NO: 2906 - DNA, 20 bp, synthetic construct
  source 1..20: mol_type = other DNA
acaagcggctaggagttccg

SEQ ID NO: 2907 - DNA, 20 bp, synthetic construct
  source 1..20: mol_type = other DNA
acaagagttgcctgaacttt

SEQ ID NO: 2908 - DNA, 21 bp, synthetic construct
  source 1..21: mol_type = other DNA
acaagaatcctcacaataccg

SEQ ID NO: 2909 - DNA, 20 bp, synthetic construct
  source 1..20: mol_type = other DNA
acaagaagatgaggcatagc

SEQ ID NO: 2910 - DNA, 20 bp, synthetic construct
  source 1..20: mol_type = other DNA
acaagaacacatcatacaaa

SEQ ID NO: 2911 - DNA, 20 bp, synthetic construct
  source 1..20: mol_type = other DNA
acaagaaatgtgaaaccaca

SEQ ID NO: 2912 - DNA, 21 bp, synthetic construct
  source 1..21: mol_type = other DNA
acaacctttcaccaaactctg

SEQ ID NO: 2913 - DNA, 21 bp, synthetic construct
  source 1..21: mol_type = other DNA
acaacagtagtttccggaagt

SEQ ID NO: 2914 - DNA, 20 bp, synthetic construct
  source 1..20: mol_type = other DNA
acaaatggcactagtaaact

SEQ ID NO: 2915 - DNA, 21 bp, synthetic construct
  source 1..21: mol_type = other DNA
acaaagagatggggttactct

SEQ ID NO: 2916 - DNA, 20 bp, synthetic construct
  source 1..20: mol_type = other DNA
acaaactttgccagcaaatc

SEQ ID NO: 2917 - DNA, 20 bp, synthetic construct
  source 1..20: mol_type = other DNA
aattttccgaaagcccagga

SEQ ID NO: 2918 - DNA, 21 bp, synthetic construct
  source 1..21: mol_type = other DNA
aattttatgggttatgtcatt

SEQ ID NO: 2919 - DNA, 20 bp, synthetic construct
  source 1..20: mol_type = other DNA
aattttatgggttatgtcat

SEQ ID NO: 2920 - DNA, 20 bp, synthetic construct
  source 1..20: mol_type = other DNA
aatttggaagatccagcatc

SEQ ID NO: 2921 - DNA, 20 bp, synthetic construct
  source 1..20: mol_type = other DNA
aatttatgcctacagcctcc

SEQ ID NO: 2922 - DNA, 20 bp, synthetic construct
  source 1..20: mol_type = other DNA
aattggtaacagcggtaaaa

SEQ ID NO: 2923 - DNA, 20 bp, synthetic construct
  source 1..20: mol_type = other DNA
aattgagagaagtccaccac

SEQ ID NO: 2924 - DNA, 20 bp, synthetic construct
  source 1..20: mol_type = other DNA
aattctttgctggggggaac

SEQ ID NO: 2925 - DNA, 21 bp, synthetic construct
  source 1..21: mol_type = other DNA
aattcgttgacatactttcca

SEQ ID NO: 2926 - DNA, 20 bp, synthetic construct
  source 1..20: mol_type = other DNA
aattcgcagtccccaacctc

SEQ ID NO: 2927 - DNA, 20 bp, synthetic construct
  source 1..20: mol_type = other DNA
aatgtttgctccagacctgc

SEQ ID NO: 2928 - DNA, 20 bp, synthetic construct
  source 1..20: mol_type = other DNA
aatgtcaacgaccgaccttg

SEQ ID NO: 2929 - DNA, 21 bp, synthetic construct
  source 1..21: mol_type = other DNA
aatgtatacccaaagacaaaa

SEQ ID NO: 2930 - DNA, 20 bp, synthetic construct
  source 1..20: mol_type = other DNA
aatgtatacccaaagacaaa

SEQ ID NO: 2931 - DNA, 20 bp, synthetic construct
  source 1..20: mol_type = other DNA
aatggggcagcaaaacccaa

SEQ ID NO: 2932 - DNA, 20 bp, synthetic construct
  source 1..20: mol_type = other DNA
aatggcactagtaaactgag

SEQ ID NO: 2933 - DNA, 21 bp, synthetic construct
  source 1..21: mol_type = other DNA
aatgattaactagatgttctg

SEQ ID NO: 2934 - DNA, 20 bp, synthetic construct
  source 1..20: mol_type = other DNA
aatgattaactagatgttct

SEQ ID NO: 2935 - DNA, 20 bp, synthetic construct
  source 1..20: mol_type = other DNA
aatgactctagctacctggg

SEQ ID NO: 2936 - DNA, 21 bp, synthetic construct
  source 1..21: mol_type = other DNA
aatcttcttttctcattaact

SEQ ID NO: 2937 - DNA, 20 bp, synthetic construct
  source 1..20: mol_type = other DNA
aatctcgggaacctcaatgt

SEQ ID NO: 2938 - DNA, 21 bp, synthetic construct
  source 1..21: mol_type = other DNA
aatcgccgcgtcgcagaagat

SEQ ID NO: 2939 - DNA, 21 bp, synthetic construct
  source 1..21: mol_type = other DNA
aatcctgcggacgacccttct

SEQ ID NO: 2940 - DNA, 20 bp, synthetic construct
  source 1..20: mol_type = other DNA
aatcctctgggattctttcc

SEQ ID NO: 2941 - DNA, 20 bp, synthetic construct
  source 1..20: mol_type = other DNA
aatccgcctcctgcctccac

SEQ ID NO: 2942 - DNA, 20 bp, synthetic construct
  source 1..20: mol_type = other DNA
aatcccagaggattgctggt

SEQ ID NO: 2943 - DNA, 20 bp, synthetic construct
  source 1..20: mol_type = other DNA
aatcaataggcctgttaata

SEQ ID NO: 2944 - DNA, 20 bp, synthetic construct
  source 1..20: mol_type = other DNA
aatatttggtaacctttgga

SEQ ID NO: 2945 - DNA, 20 bp, synthetic construct
  source 1..20: mol_type = other DNA
aatatggtgacccacaaaat

SEQ ID NO: 2946 - DNA, 21 bp, synthetic construct
  source 1..21: mol_type = other DNA
aatagtgtctagtttggaagt

SEQ ID NO: 2947 - DNA, 20 bp, synthetic construct
  source 1..20: mol_type = other DNA
aatagtgtctagtttggaag

SEQ ID NO: 2948 - DNA, 20 bp, synthetic construct
  source 1..20: mol_type = other DNA
aatactaacattgaggttcc

SEQ ID NO: 2949 - DNA, 20 bp, synthetic construct
  source 1..20: mol_type = other DNA
aatacaggcctctcactctg

SEQ ID NO: 2950 - DNA, 20 bp, synthetic construct
  source 1..20: mol_type = other DNA
aagttttctaaaacattctt

SEQ ID NO: 2951 - DNA, 21 bp, synthetic construct
  source 1..21: mol_type = other DNA
aagttggaggacaggaggttg

SEQ ID NO: 2952 - DNA, 20 bp, synthetic construct
  source 1..20: mol_type = other DNA
aagttatgggtccttgccac

SEQ ID NO: 2953 - DNA, 20 bp, synthetic construct
  source 1..20: mol_type = other DNA
aagtgaaagcctgcttagat

SEQ ID NO: 2954 - DNA, 20 bp, synthetic construct
  source 1..20: mol_type = other DNA
aagtcagaaggcaaaaacga

SEQ ID NO: 2955 - DNA, 21 bp, synthetic construct
  source 1..21: mol_type = other DNA
aaggtttggtacagcaacagg

SEQ ID NO: 2956 - DNA, 20 bp, synthetic construct
  source 1..20: mol_type = other DNA
aaggtttggtacagcaacag

SEQ ID NO: 2957 - DNA, 21 bp, synthetic construct
  source 1..21: mol_type = other DNA
aaggttaccaaatatttacca

SEQ ID NO: 2958 - DNA, 20 bp, synthetic construct
  source 1..20: mol_type = other DNA
aaggtggagacagcggggta

SEQ ID NO: 2959 - DNA, 20 bp, synthetic construct
  source 1..20: mol_type = other DNA
aaggtcggtcgttgacattg

SEQ ID NO: 2960 - DNA, 20 bp, synthetic construct
  source 1..20: mol_type = other DNA
aaggtaggagctggagcatt

SEQ ID NO: 2961 - DNA, 20 bp, synthetic construct
  source 1..20: mol_type = other DNA
aagggtcgtccgcaggattc

SEQ ID NO: 2962 - DNA, 20 bp, synthetic construct
  source 1..20: mol_type = other DNA
aagggtcgatgtccatgccc

SEQ ID NO: 2963 - DNA, 21 bp, synthetic construct
  source 1..21: mol_type = other DNA
aaggggtcctaggaatcctga

SEQ ID NO: 2964 - DNA, 20 bp, synthetic construct
  source 1..20: mol_type = other DNA
aaggggacgagagagtccca

SEQ ID NO: 2965 - DNA, 20 bp, synthetic construct
  source 1..20: mol_type = other DNA
aagggactcaagatgctgta

SEQ ID NO: 2966 - DNA, 20 bp, synthetic construct
  source 1..20: mol_type = other DNA
aaggcttcccgatacagagc

SEQ ID NO: 2967 - DNA, 20 bp, synthetic construct
  source 1..20: mol_type = other DNA
aaggcgggtatattatataa

SEQ ID NO: 2968 - DNA, 20 bp, synthetic construct
  source 1..20: mol_type = other DNA
aaggccttgtaagttggcga

SEQ ID NO: 2969 - DNA, 20 bp, synthetic construct
  source 1..20: mol_type = other DNA
aaggcctccgtgcggtgggg

SEQ ID NO: 2970 - DNA, 20 bp, synthetic construct
  source 1..20: mol_type = other DNA
aaggcacagcttggaggctt

SEQ ID NO: 2971 - DNA, 20 bp, synthetic construct
  source 1..20: mol_type = other DNA
aaggacacctggccagacgc

SEQ ID NO: 2972 - DNA, 20 bp, synthetic construct
  source 1..20: mol_type = other DNA
aaggaaagaagtcagaaggc

SEQ ID NO: 2973 - DNA, 21 bp, synthetic construct
  source 1..21: mol_type = other DNA
aagcgaagtgcacacggtccg

SEQ ID NO: 2974 - DNA, 20 bp, synthetic construct
  source 1..20: mol_type = other DNA
aagcgaagtgcacacggtcc

SEQ ID NO: 2975 - DNA, 20 bp, synthetic construct
  source 1..20: mol_type = other DNA
aagcctccaagctgtgcctt

SEQ ID NO: 2976 - DNA, 20 bp, synthetic construct
  source 1..20: mol_type = other DNA
aagccctacgaaccactgaa

SEQ ID NO: 2977 - DNA, 20 bp, synthetic construct
  source 1..20: mol_type = other DNA
aagccccagccagtgggggt

SEQ ID NO: 2978 - DNA, 20 bp, synthetic construct
  source 1..20: mol_type = other DNA
aagcaattctttgctggggg

SEQ ID NO: 2979 - DNA, 20 bp, synthetic construct
  source 1..20: mol_type = other DNA
aagattgacgataagggaga

SEQ ID NO: 2980 - DNA, 20 bp, synthetic construct
  source 1..20: mol_type = other DNA
aagattctgccccatgctgt

SEQ ID NO: 2981 - DNA, 20 bp, synthetic construct
  source 1..20: mol_type = other DNA
aagatggtgttttccaatga

SEQ ID NO: 2982 - DNA, 20 bp, synthetic construct
  source 1..20: mol_type = other DNA
aagatctcgtactgaaggaa

SEQ ID NO: 2983 - DNA, 20 bp, synthetic construct
  source 1..20: mol_type = other DNA
aagatctacagcatggggca

SEQ ID NO: 2984 - DNA, 20 bp, synthetic construct
  source 1..20: mol_type = other DNA
aagaggactcttggactctc

SEQ ID NO: 2985 - DNA, 20 bp, synthetic construct
  source 1..20: mol_type = other DNA
aagagatggggttactctct

SEQ ID NO: 2986 - DNA, 20 bp, synthetic construct
  source 1..20: mol_type = other DNA
aagagatgattaggcagagg

SEQ ID NO: 2987 - DNA, 20 bp, synthetic construct
  source 1..20: mol_type = other DNA
aagagagaaacaacacatag

SEQ ID NO: 2988 - DNA, 21 bp, synthetic construct
  source 1..21: mol_type = other DNA
aagagaaaccgttatagagta

SEQ ID NO: 2989 - DNA, 20 bp, synthetic construct
  source 1..20: mol_type = other DNA
aagactgtttgtttaaagac

SEQ ID NO: 2990 - DNA, 20 bp, synthetic construct
  source 1..20: mol_type = other DNA
aagactgggaggagttgggg

SEQ ID NO: 2991 - DNA, 21 bp, synthetic construct
  source 1..21: mol_type = other DNA
aagacattatcaaaaaatgtg

SEQ ID NO: 2992 - DNA, 20 bp, synthetic construct
  source 1..20: mol_type = other DNA
aagacattatcaaaaaatgt

SEQ ID NO: 2993 - DNA, 20 bp, synthetic construct
  source 1..20: mol_type = other DNA
aagaatttggagctactgtg

SEQ ID NO: 2994 - DNA, 20 bp, synthetic construct
  source 1..20: mol_type = other DNA
aagaattgcttgcctgagtg

SEQ ID NO: 2995 - DNA, 20 bp, synthetic construct
  source 1..20: mol_type = other DNA
aagaatcctcacaataccgc

SEQ ID NO: 2996 - DNA, 21 bp, synthetic construct
  source 1..21: mol_type = other DNA
aagaagtcagaaggcaaaaac

SEQ ID NO: 2997 - DNA, 20 bp, synthetic construct
  source 1..20: mol_type = other DNA
aagaagtcagaaggcaaaaa

SEQ ID NO: 2998 - DNA, 20 bp, synthetic construct
  source 1..20: mol_type = other DNA
aagaagattgcaattgatta

SEQ ID NO: 2999 - DNA, 20 bp, synthetic construct
  source 1..20: mol_type = other DNA
aagaagatgaggcatagcag

SEQ ID NO: 3000 - DNA, 20 bp, synthetic construct
  source 1..20: mol_type = other DNA
aagaaccaacaagaagatga

SEQ ID NO: 3001 - DNA, 20 bp, synthetic construct
  source 1..20: mol_type = other DNA
aagaaaattggtaacagcgg

SEQ ID NO: 3002 - DNA, 20 bp, synthetic construct
  source 1..20: mol_type = other DNA
aacttgtcctggttatcgct

SEQ ID NO: 3003 - DNA, 21 bp, synthetic construct
  source 1..21: mol_type = other DNA
aacttccaatgacataaccca

SEQ ID NO: 3004 - DNA, 20 bp, synthetic construct
  source 1..20: mol_type = other DNA
aactggagccaccagcaggg

SEQ ID NO: 3005 - DNA, 20 bp, synthetic construct
  source 1..20: mol_type = other DNA
aactgaaagccaaacagtgg

SEQ ID NO: 3006 - DNA, 20 bp, synthetic construct
  source 1..20: mol_type = other DNA
aactctgttgtcctctcccg

SEQ ID NO: 3007 - DNA, 20 bp, synthetic construct
  source 1..20: mol_type = other DNA
aactctgcaagatcccagag

SEQ ID NO: 3008 - DNA, 20 bp, synthetic construct
  source 1..20: mol_type = other DNA
aactcctcccagtctttaaa

SEQ ID NO: 3009 - DNA, 20 bp, synthetic construct
  source 1..20: mol_type = other DNA
aactccctcgcctcgcagac

SEQ ID NO: 3010 - DNA, 20 bp, synthetic construct
  source 1..20: mol_type = other DNA
aactagatgttctggataat

SEQ ID NO: 3011 - DNA, 20 bp, synthetic construct
  source 1..20: mol_type = other DNA
aactactgttgttagacgac

SEQ ID NO: 3012 - DNA, 20 bp, synthetic construct
  source 1..20: mol_type = other DNA
aactaccgtgtgtcttggcc

SEQ ID NO: 3013 - DNA, 20 bp, synthetic construct
  source 1..20: mol_type = other DNA
aactaatgactctagctacc

SEQ ID NO: 3014 - DNA, 20 bp, synthetic construct
  source 1..20: mol_type = other DNA
aacggtttctcttccaaaag

SEQ ID NO: 3015 - DNA, 20 bp, synthetic construct
  source 1..20: mol_type = other DNA
aacgccgcagacacatccag

SEQ ID NO: 3016 - DNA, 20 bp, synthetic construct
  source 1..20: mol_type = other DNA
aacgcccaccgaatgttgcc

SEQ ID NO: 3017 - DNA, 21 bp, synthetic construct
  source 1..21: mol_type = other DNA
aacgcaggataaccacattgt

SEQ ID NO: 3018 - DNA, 20 bp, synthetic construct
  source 1..20: mol_type = other DNA
aacgagagtaactccacagt

SEQ ID NO: 3019 - DNA, 20 bp, synthetic construct
  source 1..20: mol_type = other DNA
aaccttttcggctcctctgc

SEQ ID NO: 3020 - DNA, 20 bp, synthetic construct
  source 1..20: mol_type = other DNA
aacctttggataaaacctag

SEQ ID NO: 3021 - DNA, 20 bp, synthetic construct
  source 1..20: mol_type = other DNA
aacctttcaccaaactctgc

SEQ ID NO: 3022 - DNA, 20 bp, synthetic construct
  source 1..20: mol_type = other DNA
aacctgcatgactactgctc

SEQ ID NO: 3023 - DNA, 21 bp, synthetic construct
  source 1..21: mol_type = other DNA
aacctagcaggcataatcaat

SEQ ID NO: 3024 - DNA, 21 bp, synthetic construct
  source 1..21: mol_type = other DNA
aaccctaacaaaacaaagaga

SEQ ID NO: 3025 - DNA, 21 bp, synthetic construct
  source 1..21: mol_type = other DNA
aaccccgcctgtaacacgaga

SEQ ID NO: 3026 - DNA, 20 bp, synthetic construct
  source 1..20: mol_type = other DNA
aaccccgcctgtaacacgag

SEQ ID NO: 3027 - DNA, 20 bp, synthetic construct
  source 1..20: mol_type = other DNA
aacccccactggctggggct

SEQ ID NO: 3028 - DNA, 20 bp, synthetic construct
  source 1..20: mol_type = other DNA
aacccataaaattcagagag

SEQ ID NO: 3029 - DNA, 20 bp, synthetic construct
  source 1..20: mol_type = other DNA
aaccaggacaagttggagga

SEQ ID NO: 3030 - DNA, 20 bp, synthetic construct
  source 1..20: mol_type = other DNA
aaccactgaacaaatggcac

SEQ ID NO: 3031 - DNA, 20 bp, synthetic construct
  source 1..20: mol_type = other DNA
aacattgaggttcccgagat

SEQ ID NO: 3032 - DNA, 20 bp, synthetic construct
  source 1..20: mol_type = other DNA
aacatggagaacatcacatc

SEQ ID NO: 3033 - DNA, 20 bp, synthetic construct
  source 1..20: mol_type = other DNA
aacatcacatcaggattcct

SEQ ID NO: 3034 - DNA, 20 bp, synthetic construct
  source 1..20: mol_type = other DNA
aacataccttgatagtccag

SEQ ID NO: 3035 - DNA, 20 bp, synthetic construct
  source 1..20: mol_type = other DNA
aacagtgggggaaagcccta

SEQ ID NO: 3036 - DNA, 21 bp, synthetic construct
  source 1..21: mol_type = other DNA
aacagtctttgaagtatgcct

SEQ ID NO: 3037 - DNA, 21 bp, synthetic construct
  source 1..21: mol_type = other DNA
aacagtaggacatgaacaaga

SEQ ID NO: 3038 - DNA, 20 bp, synthetic construct
  source 1..20: mol_type = other DNA
aacagtaggacatgaacaag

SEQ ID NO: 3039 - DNA, 20 bp, synthetic construct
  source 1..20: mol_type = other DNA
aacagcggtaaaaagggact

SEQ ID NO: 3040 - DNA, 20 bp, synthetic construct
  source 1..20: mol_type = other DNA
aacagagttatcagtcccga

SEQ ID NO: 3041 - DNA, 20 bp, synthetic construct
  source 1..20: mol_type = other DNA
aacacgagaaggggtcctag

SEQ ID NO: 3042 - DNA, 20 bp, synthetic construct
  source 1..20: mol_type = other DNA
aacacccacccaggtagcta

SEQ ID NO: 3043 - DNA, 21 bp, synthetic construct
  source 1..21: mol_type = other DNA
aacacatcatacaaaaaatca

SEQ ID NO: 3044 - DNA, 20 bp, synthetic construct
  source 1..20: mol_type = other DNA
aacacatcatacaaaaaatc

SEQ ID NO: 3045 - DNA, 20 bp, synthetic construct
  source 1..20: mol_type = other DNA
aacacagcaaatccagattg

SEQ ID NO: 3046 - DNA, 20 bp, synthetic construct
  source 1..20: mol_type = other DNA
aacaatgctcaggagactct

SEQ ID NO: 3047 - DNA, 20 bp, synthetic construct
  source 1..20: mol_type = other DNA
aacaaggacacctggccaga

SEQ ID NO: 3048 - DNA, 20 bp, synthetic construct
  source 1..20: mol_type = other DNA
aacaagagatgattaggcag

SEQ ID NO: 3049 - DNA, 20 bp, synthetic construct
  source 1..20: mol_type = other DNA
aacaagaagatgaggcatag

SEQ ID NO: 3050 - DNA, 20 bp, synthetic construct
  source 1..20: mol_type = other DNA
aacaagaaaaaccccgcctg

SEQ ID NO: 3051 - DNA, 20 bp, synthetic construct
  source 1..20: mol_type = other DNA
aacaaatggcactagtaaac

SEQ ID NO: 3052 - DNA, 20 bp, synthetic construct
  source 1..20: mol_type = other DNA
aacaaaggacgtcccgcgca

SEQ ID NO: 3053 - DNA, 20 bp, synthetic construct
  source 1..20: mol_type = other DNA
aacaaacagtctttgaagta

SEQ ID NO: 3054 - DNA, 20 bp, synthetic construct
  source 1..20: mol_type = other DNA
aaattggtaacagcggtaaa

SEQ ID NO: 3055 - DNA, 20 bp, synthetic construct
  source 1..20: mol_type = other DNA
aaattgagagaagtccacca

SEQ ID NO: 3056 - DNA, 20 bp, synthetic construct
  source 1..20: mol_type = other DNA
aaattaacacccacccaggt

SEQ ID NO: 3057 - DNA, 20 bp, synthetic construct
  source 1..20: mol_type = other DNA
aaatgtgaaaccacaagagt

SEQ ID NO: 3058 - DNA, 20 bp, synthetic construct
  source 1..20: mol_type = other DNA
aaatgtatattaggaaaaga

SEQ ID NO: 3059 - DNA, 20 bp, synthetic construct
  source 1..20: mol_type = other DNA
aaatgtatacccaaagacaa

SEQ ID NO: 3060 - DNA, 20 bp, synthetic construct
  source 1..20: mol_type = other DNA
aaatggggcagcaaaaccca

SEQ ID NO: 3061 - DNA, 20 bp, synthetic construct
  source 1..20: mol_type = other DNA
aaatcaaagaatgttttaga

SEQ ID NO: 3062 - DNA, 20 bp, synthetic construct
  source 1..20: mol_type = other DNA
aaatatttaccattggataa

SEQ ID NO: 3063 - DNA, 20 bp, synthetic construct
  source 1..20: mol_type = other DNA
aaatacaggcctctcactct

SEQ ID NO: 3064 - DNA, 20 bp, synthetic construct
  source 1..20: mol_type = other DNA
aaagtttgtagtatgccctg

SEQ ID NO: 3065 - DNA, 20 bp, synthetic construct
  source 1..20: mol_type = other DNA
aaagttgcatggtgctggtg

SEQ ID NO: 3066 - DNA, 20 bp, synthetic construct
  source 1..20: mol_type = other DNA
aaagtgagacaagaaatgtg

SEQ ID NO: 3067 - DNA, 20 bp, synthetic construct
  source 1..20: mol_type = other DNA
aaagtatgtcaacgaattgt

SEQ ID NO: 3068 - DNA, 20 bp, synthetic construct
  source 1..20: mol_type = other DNA
aaaggtggagacagcggggt

SEQ ID NO: 3069 - DNA, 21 bp, synthetic construct
  source 1..21: mol_type = other DNA
aaaggccttgtaagttggcga

SEQ ID NO: 3070 - DNA, 20 bp, synthetic construct
  source 1..20: mol_type = other DNA
aaaggccttgtaagttggcg

SEQ ID NO: 3071 - DNA, 20 bp, synthetic construct
  source 1..20: mol_type = other DNA
aaagccaaacagtgggggaa

SEQ ID NO: 3072 - DNA, 20 bp, synthetic construct
  source 1..20: mol_type = other DNA
aaagattctgccccatgctg

SEQ ID NO: 3073 - DNA, 20 bp, synthetic construct
  source 1..20: mol_type = other DNA
aaagatggtgttttccaatg

SEQ ID NO: 3074 - DNA, 20 bp, synthetic construct
  source 1..20: mol_type = other DNA
aaagagatggggttactctc

SEQ ID NO: 3075 - DNA, 20 bp, synthetic construct
  source 1..20: mol_type = other DNA
aaagactgggaggagttggg

SEQ ID NO: 3076 - DNA, 20 bp, synthetic construct
  source 1..20: mol_type = other DNA
aaagaatttggagctactgt

SEQ ID NO: 3077 - DNA, 20 bp, synthetic construct
  source 1..20: mol_type = other DNA
aaagaatcccagaggattgc

SEQ ID NO: 3078 - DNA, 21 bp, synthetic construct
  source 1..21: mol_type = other DNA
aaacttcctattaacaggcct

SEQ ID NO: 3079 - DNA, 20 bp, synthetic construct
  source 1..20: mol_type = other DNA
aaactgttcacattttttga

SEQ ID NO: 3080 - DNA, 20 bp, synthetic construct
  source 1..20: mol_type = other DNA
aaactgagccaggagaaacg

SEQ ID NO: 3081 - DNA, 20 bp, synthetic construct
  source 1..20: mol_type = other DNA
aaactactgttgttagacga

SEQ ID NO: 3082 - DNA, 20 bp, synthetic construct
  source 1..20: mol_type = other DNA
aaacgggcaacataccttga

SEQ ID NO: 3083 - DNA, 20 bp, synthetic construct
  source 1..20: mol_type = other DNA
aaacgagagtaactccacag

SEQ ID NO: 3084 - DNA, 20 bp, synthetic construct
  source 1..20: mol_type = other DNA
aaaccccgcctgtaacacga

SEQ ID NO: 3085 - DNA, 20 bp, synthetic construct
  source 1..20: mol_type = other DNA
aaacccagcccgaatgctcc

SEQ ID NO: 3086 - DNA, 20 bp, synthetic construct
  source 1..20: mol_type = other DNA
aaacactcatcctcaggcca

SEQ ID NO: 3087 - DNA, 20 bp, synthetic construct
  source 1..20: mol_type = other DNA
aaacacagcaaatccagatt

SEQ ID NO: 3088 - DNA, 20 bp, synthetic construct
  source 1..20: mol_type = other DNA
aaacaagcggctaggagttc

SEQ ID NO: 3089 - DNA, 20 bp, synthetic construct
  source 1..20: mol_type = other DNA
aaacaaaggacgtcccgcgc

SEQ ID NO: 3090 - DNA, 20 bp, synthetic construct
  source 1..20: mol_type = other DNA
aaaattggtaacagcggtaa

SEQ ID NO: 3091 - DNA, 20 bp, synthetic construct
  source 1..20: mol_type = other DNA
aaaatcaaagaatgttttag

SEQ ID NO: 3092 - DNA, 20 bp, synthetic construct
  source 1..20: mol_type = other DNA
aaaagtgagacaagaaatgt

SEQ ID NO: 3093 - DNA, 20 bp, synthetic construct
  source 1..20: mol_type = other DNA
aaaaggttccacgcacgcgc

SEQ ID NO: 3094 - DNA, 20 bp, synthetic construct
  source 1..20: mol_type = other DNA
aaaagatggtgttttccaat

SEQ ID NO: 3095 - DNA, 20 bp, synthetic construct
  source 1..20: mol_type = other DNA
aaaacgccgcagacacatcc

SEQ ID NO: 3096 - DNA, 20 bp, synthetic construct
  source 1..20: mol_type = other DNA
aaaaccccgcctgtaacacg

SEQ ID NO: 3097 - DNA, 21 bp, synthetic construct
  source 1..21: mol_type = other DNA
aaaacattctttgattttttg

SEQ ID NO: 3098 - DNA, 21 bp, synthetic construct
  source 1..21: mol_type = other DNA
aaaacaagcggctaggagttc

SEQ ID NO: 3099 - DNA, 20 bp, synthetic construct
  source 1..20: mol_type = other DNA
aaaaatgtgaacagtttgta

SEQ ID NO: 3100 - DNA, 20 bp, synthetic construct
  source 1..20: mol_type = other DNA
aaaaatcaaagaatgtttta

SEQ ID NO: 3101 - DNA, 20 bp, synthetic construct
  source 1..20: mol_type = other DNA
aaaaagttgcatggtgctgg

SEQ ID NO: 3102 - DNA, 20 bp, synthetic construct
  source 1..20: mol_type = other DNA
aaaaaccccgcctgtaacac

SEQ ID NO: 3103 - DNA, 20 bp, synthetic construct
  source 1..20: mol_type = other DNA
aaaaaatgtgaacagtttgt

SEQ ID NO: 3104 - DNA, 20 bp, synthetic construct
  source 1..20: mol_type = other DNA
aaaaaatcaaagaatgtttt

SEQ ID NO: 3105 - RNA, 20 nt, synthetic construct
  source 1..20: mol_type = other RNA
tttttgataatgtcttggtg

SEQ ID NO: 3106 - RNA, 20 nt, synthetic construct
  source 1..20: mol_type = other RNA
ttttgtatgatgtgttcttg

SEQ ID NO: 3107 - RNA, 20 nt, synthetic construct
  source 1..20: mol_type = other RNA
ttttggaagagaaaccgtta

SEQ ID NO: 3108 - RNA, 20 nt, synthetic construct
  source 1..20: mol_type = other RNA
ttttgctcgcagcaggtctg

SEQ ID NO: 3109 - RNA, 20 nt, synthetic construct
  source 1..20: mol_type = other RNA
ttttgataatgtcttggtgt

SEQ ID NO: 3110 - RNA, 20 nt, synthetic construct
  source 1..20: mol_type = other RNA
ttttctcattaactgtaagt

SEQ ID NO: 3111 - RNA, 21 nt, synthetic construct
  source 1..21: mol_type = other RNA
ttttccgaaagcccaggatga

SEQ ID NO: 3112 - RNA, 20 nt, synthetic construct
  source 1..20: mol_type = other RNA
ttttatgggttatgtcattg

SEQ ID NO: 3113 - RNA, 21 nt, synthetic construct
  source 1..21: mol_type = other RNA
tttgtttacgtcccgtcggcg

SEQ ID NO: 3114 - RNA, 20 nt, synthetic construct
  source 1..20: mol_type = other RNA
tttgtgggtcaccatattct

SEQ ID NO: 3115 - RNA, 20 nt, synthetic construct
  source 1..20: mol_type = other RNA
tttgtctttgggtatacatt

SEQ ID NO: 3116 - RNA, 20 nt, synthetic construct
  source 1..20: mol_type = other RNA
tttgtatgatgtgttcttgt

SEQ ID NO: 3117 - RNA, 20 nt, synthetic construct
  source 1..20: mol_type = other RNA
tttgtagtatgccctgagcc

SEQ ID NO: 3118 - RNA, 20 nt, synthetic construct
  source 1..20: mol_type = other RNA
tttgtaggcccacttacagt

SEQ ID NO: 3119 - RNA, 20 nt, synthetic construct
  source 1..20: mol_type = other RNA
tttggtgtctttcggagtgt

SEQ ID NO: 3120 - RNA, 20 nt, synthetic construct
  source 1..20: mol_type = other RNA
tttggtggtctataagctgg

SEQ ID NO: 3121 - RNA, 20 nt, synthetic construct
  source 1..20: mol_type = other RNA
tttggaagtaatgattaact

SEQ ID NO: 3122 - RNA, 20 nt, synthetic construct
  source 1..20: mol_type = other RNA
tttggaagatccagcatcta

SEQ ID NO: 3123 - RNA, 20 nt, synthetic construct
  source 1..20: mol_type = other RNA
tttggaagagaaaccgttat

SEQ ID NO: 3124 - RNA, 20 nt, synthetic construct
  source 1..20: mol_type = other RNA
tttgctgtgtttgctctgaa

SEQ ID NO: 3125 - RNA, 21 nt, synthetic construct
  source 1..21: mol_type = other RNA
tttgctgccccatttacacaa

SEQ ID NO: 3126 - RNA, 20 nt, synthetic construct
  source 1..20: mol_type = other RNA
tttgctctgaaggctggatc

SEQ ID NO: 3127 - RNA, 20 nt, synthetic construct
  source 1..20: mol_type = other RNA
tttgctcgcagcaggtctgg

SEQ ID NO: 3128 - RNA, 20 nt, synthetic construct
  source 1..20: mol_type = other RNA
tttgctccagacctgctgcg

SEQ ID NO: 3129 - RNA, 21 nt, synthetic construct
  source 1..21: mol_type = other RNA
tttgccttctgacttctttcc

SEQ ID NO: 3130 - RNA, 20 nt, synthetic construct
  source 1..20: mol_type = other RNA
tttgagaaacactcatcctc

SEQ ID NO: 3131 - RNA, 20 nt, synthetic construct
  source 1..20: mol_type = other RNA
tttgaagtatgcctcaaggt

SEQ ID NO: 3132 - RNA, 21 nt, synthetic construct
  source 1..21: mol_type = other RNA
tttcttgttgacaagaatcct

SEQ ID NO: 3133 - RNA, 20 nt, synthetic construct
  source 1..20: mol_type = other RNA
tttcttgtctcacttttgga

SEQ ID NO: 3134 - RNA, 20 nt, synthetic construct
  source 1..20: mol_type = other RNA
tttctgtgtaaacaatacct

SEQ ID NO: 3135 - RNA, 20 nt, synthetic construct
  source 1..20: mol_type = other RNA
tttctcttccaaaagtgaga

SEQ ID NO: 3136 - RNA, 20 nt, synthetic construct
  source 1..20: mol_type = other RNA
tttctcctggctcagtttac

SEQ ID NO: 3137 - RNA, 20 nt, synthetic construct
  source 1..20: mol_type = other RNA
tttctcattaactgtaagtg

SEQ ID NO: 3138 - RNA, 20 nt, synthetic construct
  source 1..20: mol_type = other RNA
tttctcaaaggtggagacag

SEQ ID NO: 3139 - RNA, 21 nt, synthetic construct
  source 1..21: mol_type = other RNA
tttccttcagtacgagatctt

SEQ ID NO: 3140 - RNA, 20 nt, synthetic construct
  source 1..20: mol_type = other RNA
tttccgaaagcccaggatga

SEQ ID NO: 3141 - RNA, 20 nt, synthetic construct
  source 1..20: mol_type = other RNA
tttccaatgaggattaaaga

SEQ ID NO: 3142 - RNA, 20 nt, synthetic construct
  source 1..20: mol_type = other RNA
tttccaatcaataggcctgt

SEQ ID NO: 3143 - RNA, 20 nt, synthetic construct
  source 1..20: mol_type = other RNA
tttcagttatatggatgatg

SEQ ID NO: 3144 - RNA, 20 nt, synthetic construct
  source 1..20: mol_type = other RNA
tttatgggttatgtcattgg

SEQ ID NO: 3145 - RNA, 20 nt, synthetic construct
  source 1..20: mol_type = other RNA
tttataagggtcgatgtcca

SEQ ID NO: 3146 - RNA, 20 nt, synthetic construct
  source 1..20: mol_type = other RNA
tttagaaaacttcctattaa

SEQ ID NO: 3147 - RNA, 20 nt, synthetic construct
  source 1..20: mol_type = other RNA
tttaccccgttgcccggcaa

SEQ ID NO: 3148 - RNA, 20 nt, synthetic construct
  source 1..20: mol_type = other RNA
tttacacagaaaggccttgt

SEQ ID NO: 3149 - RNA, 20 nt, synthetic construct
  source 1..20: mol_type = other RNA
tttacacactctatggaagg

SEQ ID NO: 3150 - RNA, 20 nt, synthetic construct
  source 1..20: mol_type = other RNA
tttacacaatgtggttatcc

SEQ ID NO: 3151 - RNA, 20 nt, synthetic construct
  source 1..20: mol_type = other RNA
tttaatctaatctcctcccc

SEQ ID NO: 3152 - RNA, 20 nt, synthetic construct
  source 1..20: mol_type = other RNA
tttaaatgtatacccaaaga

SEQ ID NO: 3153 - RNA, 20 nt, synthetic construct
  source 1..20: mol_type = other RNA
tttaaagactgggaggagtt

SEQ ID NO: 3154 - RNA, 20 nt, synthetic construct
  source 1..20: mol_type = other RNA
tttaaaccctaacaaaacaa

SEQ ID NO: 3155 - RNA, 21 nt, synthetic construct
  source 1..21: mol_type = other RNA
ttgtttacacagaaaggcctt

SEQ ID NO: 3156 - RNA, 21 nt, synthetic construct
  source 1..21: mol_type = other RNA
ttgttggttcttctggactat

SEQ ID NO: 3157 - RNA, 20 nt, synthetic construct
  source 1..20: mol_type = other RNA
ttgttcatgtcctactgttc

SEQ ID NO: 3158 - RNA, 20 nt, synthetic construct
  source 1..20: mol_type = other RNA
ttgtgggtcaccatattctt

SEQ ID NO: 3159 - RNA, 21 nt, synthetic construct
  source 1..21: mol_type = other RNA
ttgtggcaaggacccataact

SEQ ID NO: 3160 - RNA, 20 nt, synthetic construct
  source 1..20: mol_type = other RNA
ttgtgaggattcttgtcaac

SEQ ID NO: 3161 - RNA, 20 nt, synthetic construct
  source 1..20: mol_type = other RNA
ttgtctttgggtatacattt

SEQ ID NO: 3162 - RNA, 20 nt, synthetic construct
  source 1..20: mol_type = other RNA
ttgtctcacttttggaagag

SEQ ID NO: 3163 - RNA, 20 nt, synthetic construct
  source 1..20: mol_type = other RNA
ttgtatgcatgtattcaatc

SEQ ID NO: 3164 - RNA, 20 nt, synthetic construct
  source 1..20: mol_type = other RNA
ttgtagtatgccctgagcct

SEQ ID NO: 3165 - RNA, 21 nt, synthetic construct
  source 1..21: mol_type = other RNA
ttgtactaggaggctgtaggc

SEQ ID NO: 3166 - RNA, 20 nt, synthetic construct
  source 1..20: mol_type = other RNA
ttgtaagttggcgagaaagt

SEQ ID NO: 3167 - RNA, 20 nt, synthetic construct
  source 1..20: mol_type = other RNA
ttggttcttctggactatca

SEQ ID NO: 3168 - RNA, 20 nt, synthetic construct
  source 1..20: mol_type = other RNA
ttggtgtaaatgtatattag

SEQ ID NO: 3169 - RNA, 20 nt, synthetic construct
  source 1..20: mol_type = other RNA
ttggtggtctataagctgga

SEQ ID NO: 3170 - RNA, 20 nt, synthetic construct
  source 1..20: mol_type = other RNA
ttggtgagtgattggaggtt

SEQ ID NO: 3171 - RNA, 20 nt, synthetic construct
  source 1..20: mol_type = other RNA
ttggtaacagcggtaaaaag

SEQ ID NO: 3172 - RNA, 20 nt, synthetic construct
  source 1..20: mol_type = other RNA
ttgggtatacatttaaaccc

SEQ ID NO: 3173 - RNA, 20 nt, synthetic construct
  source 1..20: mol_type = other RNA
ttgggggaggagattagatt

SEQ ID NO: 3174 - RNA, 20 nt, synthetic construct
  source 1..20: mol_type = other RNA
ttgggattgaagtcccaatc

SEQ ID NO: 3175 - RNA, 20 nt, synthetic construct
  source 1..20: mol_type = other RNA
ttgggacttcaatcccaaca

SEQ ID NO: 3176 - RNA, 20 nt, synthetic construct
  source 1..20: mol_type = other RNA
ttggctttcagttatatgga

SEQ ID NO: 3177 - RNA, 20 nt, synthetic construct
  source 1..20: mol_type = other RNA
ttggcgagaaagtgaaagcc

SEQ ID NO: 3178 - RNA, 20 nt, synthetic construct
  source 1..20: mol_type = other RNA
ttggatccagccttcagagc

SEQ ID NO: 3179 - RNA, 21 nt, synthetic construct
  source 1..21: mol_type = other RNA
ttggaggacaggaggttggtg

SEQ ID NO: 3180 - RNA, 20 nt, synthetic construct
  source 1..20: mol_type = other RNA
ttggaggacaggaggttggt

SEQ ID NO: 3181 - RNA, 20 nt, synthetic construct
  source 1..20: mol_type = other RNA
ttggaagatccagcatctag

SEQ ID NO: 3182 - RNA, 20 nt, synthetic construct
  source 1..20: mol_type = other RNA
ttggaagagaaaccgttata

SEQ ID NO: 3183 - RNA, 20 nt, synthetic construct
  source 1..20: mol_type = other RNA
ttgcttgcctgagtgcagta

SEQ ID NO: 3184 - RNA, 21 nt, synthetic construct
  source 1..21: mol_type = other RNA
ttgctgtgtttgctctgaagg

SEQ ID NO: 3185 - RNA, 20 nt, synthetic construct
  source 1..20: mol_type = other RNA
ttgctgacgcaacccccact

SEQ ID NO: 3186 - RNA, 21 nt, synthetic construct
  source 1..21: mol_type = other RNA
ttgctctgaaggctggatcca

SEQ ID NO: 3187 - RNA, 20 nt, synthetic construct
  source 1..20: mol_type = other RNA
ttgcctgagtgcagtatggt

SEQ ID NO: 3188 - RNA, 21 nt, synthetic construct
  source 1..21: mol_type = other RNA
ttgcctgaactttaggcccat

SEQ ID NO: 3189 - RNA, 20 nt, synthetic construct
  source 1..20: mol_type = other RNA
ttgcccaaggtcttacataa

SEQ ID NO: 3190 - RNA, 20 nt, synthetic construct
  source 1..20: mol_type = other RNA
ttgccagcaaatccgcctcc

SEQ ID NO: 3191 - RNA, 21 nt, synthetic construct
  source 1..21: mol_type = other RNA
ttgcatggtgctggtgcgcag

SEQ ID NO: 3192 - RNA, 20 nt, synthetic construct
  source 1..20: mol_type = other RNA
ttgcaattgattatgcctgc

SEQ ID NO: 3193 - RNA, 20 nt, synthetic construct
  source 1..20: mol_type = other RNA
ttgcaatcttcttttctcat

SEQ ID NO: 3194 - RNA, 20 nt, synthetic construct
  source 1..20: mol_type = other RNA
ttgattggaaagtatgtcaa

SEQ ID NO: 3195 - RNA, 20 nt, synthetic construct
  source 1..20: mol_type = other RNA
ttgaggatcctggaattaga

SEQ ID NO: 3196 - RNA, 20 nt, synthetic construct
  source 1..20: mol_type = other RNA
ttgagaaacactcatcctca

SEQ ID NO: 3197 - RNA, 20 nt, synthetic construct
  source 1..20: mol_type = other RNA
ttgacattgcagagagtcca

SEQ ID NO: 3198 - RNA, 20 nt, synthetic construct
  source 1..20: mol_type = other RNA
ttgacatactttccaatcaa

SEQ ID NO: 3199 - RNA, 20 nt, synthetic construct
  source 1..20: mol_type = other RNA
ttgaagtcccaatctggatt

SEQ ID NO: 3200 - RNA, 21 nt, synthetic construct
  source 1..21: mol_type = other RNA
ttgaacagtaggacatgaaca

SEQ ID NO: 3201 - RNA, 20 nt, synthetic construct
  source 1..20: mol_type = other RNA
ttgaacagtaggacatgaac

SEQ ID NO: 3202 - RNA, 20 nt, synthetic construct
  source 1..20: mol_type = other RNA
ttctttcccgaccaccagtt

SEQ ID NO: 3203 - RNA, 20 nt, synthetic construct
  source 1..20: mol_type = other RNA
ttcttgtctcacttttggaa

SEQ ID NO: 3204 - RNA, 20 nt, synthetic construct
  source 1..20: mol_type = other RNA
ttcttgggaacaagatctac

SEQ ID NO: 3205 - RNA, 21 nt, synthetic construct
  source 1..21: mol_type = other RNA
ttctcttccaaaagtgagaca

SEQ ID NO: 3206 - RNA, 20 nt, synthetic construct
  source 1..20: mol_type = other RNA
ttctcttccaaaagtgagac

SEQ ID NO: 3207 - RNA, 20 nt, synthetic construct
  source 1..20: mol_type = other RNA
ttctctcaattttctagggg

SEQ ID NO: 3208 - RNA, 20 nt, synthetic construct
  source 1..20: mol_type = other RNA
ttctcgaggattggggaccc

SEQ ID NO: 3209 - RNA, 20 nt, synthetic construct
  source 1..20: mol_type = other RNA
ttctcatctgccggaccgtg

SEQ ID NO: 3210 - RNA, 20 nt, synthetic construct
  source 1..20: mol_type = other RNA
ttctcaaaggtggagacagc

SEQ ID NO: 3211 - RNA, 20 nt, synthetic construct
  source 1..20: mol_type = other RNA
ttcgcttcacctctgcacgt

SEQ ID NO: 3212 - RNA, 20 nt, synthetic construct
  source 1..20: mol_type = other RNA
ttcgcactcctccagcttat

SEQ ID NO: 3213 - RNA, 20 nt, synthetic construct
  source 1..20: mol_type = other RNA
ttccttggactcataaggtg

SEQ ID NO: 3214 - RNA, 20 nt, synthetic construct
  source 1..20: mol_type = other RNA
ttccttgagcagtagtcatg

SEQ ID NO: 3215 - RNA, 20 nt, synthetic construct
  source 1..20: mol_type = other RNA
ttcctgtctggcgattggtg

SEQ ID NO: 3216 - RNA, 20 nt, synthetic construct
  source 1..20: mol_type = other RNA
ttcctatgggagtgggcctc

SEQ ID NO: 3217 - RNA, 20 nt, synthetic construct
  source 1..20: mol_type = other RNA
ttcctaatatacatttacac

SEQ ID NO: 3218 - RNA, 20 nt, synthetic construct
  source 1..20: mol_type = other RNA
ttccgtccgaaggtttggta

SEQ ID NO: 3219 - RNA, 20 nt, synthetic construct
  source 1..20: mol_type = other RNA
ttccggaagtgttgatagga

SEQ ID NO: 3220 - RNA, 20 nt, synthetic construct
  source 1..20: mol_type = other RNA
ttccggaaactactgttgtt

SEQ ID NO: 3221 - RNA, 20 nt, synthetic construct
  source 1..20: mol_type = other RNA
ttccgcagtatggatcggca

SEQ ID NO: 3222 - RNA, 20 nt, synthetic construct
  source 1..20: mol_type = other RNA
ttccgaaagcccaggatgat

SEQ ID NO: 3223 - RNA, 20 nt, synthetic construct
  source 1..20: mol_type = other RNA
ttcccgatacagagctgagg

SEQ ID NO: 3224 - RNA, 20 nt, synthetic construct
  source 1..20: mol_type = other RNA
ttcccgagattgagatcttc

SEQ ID NO: 3225 - RNA, 20 nt, synthetic construct
  source 1..20: mol_type = other RNA
ttccccctagaaaattgaga

SEQ ID NO: 3226 - RNA, 20 nt, synthetic construct
  source 1..20: mol_type = other RNA
ttcccccactgtttggcttt

SEQ ID NO: 3227 - RNA, 20 nt, synthetic construct
  source 1..20: mol_type = other RNA
ttccccaccttatgagtcca

SEQ ID NO: 3228 - RNA, 20 nt, synthetic construct
  source 1..20: mol_type = other RNA
ttccaggatcctcaaccacc

SEQ ID NO: 3229 - RNA, 20 nt, synthetic construct
  source 1..20: mol_type = other RNA
ttccaatgacataacccata

SEQ ID NO: 3230 - RNA, 20 nt, synthetic construct
  source 1..20: mol_type = other RNA
ttccaaattaacacccaccc

SEQ ID NO: 3231 - RNA, 20 nt, synthetic construct
  source 1..20: mol_type = other RNA
ttcaggtattgtttacacag

SEQ ID NO: 3232 - RNA, 20 nt, synthetic construct
  source 1..20: mol_type = other RNA
ttcactttctcgccaactta

SEQ ID NO: 3233 - RNA, 20 nt, synthetic construct
  source 1..20: mol_type = other RNA
ttcacctctgcacgtcgcat

SEQ ID NO: 3234 - RNA, 20 nt, synthetic construct
  source 1..20: mol_type = other RNA
ttcaaagactgtttgtttaa

SEQ ID NO: 3235 - RNA, 20 nt, synthetic construct
  source 1..20: mol_type = other RNA
ttatcgctggatgtgtctgc

SEQ ID NO: 3236 - RNA, 20 nt, synthetic construct
  source 1..20: mol_type = other RNA
ttatcagtcccgataatgtt

SEQ ID NO: 3237 - RNA, 20 nt, synthetic construct
  source 1..20: mol_type = other RNA
ttatatggatgatgtggtat

SEQ ID NO: 3238 - RNA, 20 nt, synthetic construct
  source 1..20: mol_type = other RNA
ttagtattccttggactcat

SEQ ID NO: 3239 - RNA, 20 nt, synthetic construct
  source 1..20: mol_type = other RNA
ttagggtttaaatgtatacc

SEQ ID NO: 3240 - RNA, 20 nt, synthetic construct
  source 1..20: mol_type = other RNA
ttaggcagaggtgaaaaagt

SEQ ID NO: 3241 - RNA, 20 nt, synthetic construct
  source 1..20: mol_type = other RNA
ttagattgaatacatgcata

SEQ ID NO: 3242 - RNA, 20 nt, synthetic construct
  source 1..20: mol_type = other RNA
ttagattaaaggtctttgta

SEQ ID NO: 3243 - RNA, 20 nt, synthetic construct
  source 1..20: mol_type = other RNA
ttagaaaacttcctattaac

SEQ ID NO: 3244 - RNA, 20 nt, synthetic construct
  source 1..20: mol_type = other RNA
ttactgctcctgaactggag

SEQ ID NO: 3245 - RNA, 20 nt, synthetic construct
  source 1..20: mol_type = other RNA
ttactctcgtttttgccttc

SEQ ID NO: 3246 - RNA, 20 nt, synthetic construct
  source 1..20: mol_type = other RNA
ttacgcggactccccgtctg

SEQ ID NO: 3247 - RNA, 20 nt, synthetic construct
  source 1..20: mol_type = other RNA
ttaccccgttgcccggcaac

SEQ ID NO: 3248 - RNA, 20 nt, synthetic construct
  source 1..20: mol_type = other RNA
ttaccattggataagggtat

SEQ ID NO: 3249 - RNA, 20 nt, synthetic construct
  source 1..20: mol_type = other RNA
ttacagttaatgagaaaaga

SEQ ID NO: 3250 - RNA, 20 nt, synthetic construct
  source 1..20: mol_type = other RNA
ttacaccaagacattatcaa

SEQ ID NO: 3251 - RNA, 20 nt, synthetic construct
  source 1..20: mol_type = other RNA
ttacacactctatggaaggc

SEQ ID NO: 3252 - RNA, 20 nt, synthetic construct
  source 1..20: mol_type = other RNA
ttaatgagaaaagaagattg

SEQ ID NO: 3253 - RNA, 20 nt, synthetic construct
  source 1..20: mol_type = other RNA
ttaatcattacttccaaact

SEQ ID NO: 3254 - RNA, 20 nt, synthetic construct
  source 1..20: mol_type = other RNA
ttaatacccttatccaatgg

SEQ ID NO: 3255 - RNA, 20 nt, synthetic construct
  source 1..20: mol_type = other RNA
ttaactgtaagtgggcctac

SEQ ID NO: 3256 - RNA, 21 nt, synthetic construct
  source 1..21: mol_type = other RNA
ttaactagatgttctggataa

SEQ ID NO: 3257 - RNA, 20 nt, synthetic construct
  source 1..20: mol_type = other RNA
ttaacaggcctattgattgg

SEQ ID NO: 3258 - RNA, 20 nt, synthetic construct
  source 1..20: mol_type = other RNA
ttaacacccacccaggtagc

SEQ ID NO: 3259 - RNA, 20 nt, synthetic construct
  source 1..20: mol_type = other RNA
ttaaatgtatacccaaagac

SEQ ID NO: 3260 - RNA, 20 nt, synthetic construct
  source 1..20: mol_type = other RNA
ttaaaggtctttgtactagg

SEQ ID NO: 3261 - RNA, 20 nt, synthetic construct
  source 1..20: mol_type = other RNA
ttaaagactgggaggagttg

SEQ ID NO: 3262 - RNA, 20 nt, synthetic construct
  source 1..20: mol_type = other RNA
ttaaagacaggtacagtaga

SEQ ID NO: 3263 - RNA, 20 nt, synthetic construct
  source 1..20: mol_type = other RNA
ttaaaccctaacaaaacaaa

SEQ ID NO: 3264 - RNA, 20 nt, synthetic construct
  source 1..20: mol_type = other RNA
tgttttgctcgcagcaggtc

SEQ ID NO: 3265 - RNA, 20 nt, synthetic construct
  source 1..20: mol_type = other RNA
tgttttagaaaacttcctat

SEQ ID NO: 3266 - RNA, 20 nt, synthetic construct
  source 1..20: mol_type = other RNA
tgtttgtttaaagactggga

SEQ ID NO: 3267 - RNA, 21 nt, synthetic construct
  source 1..21: mol_type = other RNA
tgtttggctttcagttatatg

SEQ ID NO: 3268 - RNA, 20 nt, synthetic construct
  source 1..20: mol_type = other RNA
tgtttggctttcagttatat

SEQ ID NO: 3269 - RNA, 20 nt, synthetic construct
  source 1..20: mol_type = other RNA
tgtttgctccagacctgctg

SEQ ID NO: 3270 - RNA, 20 nt, synthetic construct
  source 1..20: mol_type = other RNA
tgtttctcaaaggtggagac

SEQ ID NO: 3271 - RNA, 20 nt, synthetic construct
  source 1..20: mol_type = other RNA
tgtttacgtcccgtcggcgc

SEQ ID NO: 3272 - RNA, 20 nt, synthetic construct
  source 1..20: mol_type = other RNA
tgttggttcttctggactat

SEQ ID NO: 3273 - RNA, 21 nt, synthetic construct
  source 1..21: mol_type = other RNA
tgttgggattgaagtcccaat

SEQ ID NO: 3274 - RNA, 20 nt, synthetic construct
  source 1..20: mol_type = other RNA
tgttgctgtaccaaaccttc

SEQ ID NO: 3275 - RNA, 20 nt, synthetic construct
  source 1..20: mol_type = other RNA
tgttgcccaaggtcttacat

SEQ ID NO: 3276 - RNA, 20 nt, synthetic construct
  source 1..20: mol_type = other RNA
tgttgacataactgactact

SEQ ID NO: 3277 - RNA, 20 nt, synthetic construct
  source 1..20: mol_type = other RNA
tgttctccatgttcagcgca

SEQ ID NO: 3278 - RNA, 20 nt, synthetic construct
  source 1..20: mol_type = other RNA
tgttcatgtcctactgttca

SEQ ID NO: 3279 - RNA, 21 nt, synthetic construct
  source 1..21: mol_type = other RNA
tgttagtattccttggactca

SEQ ID NO: 3280 - RNA, 20 nt, synthetic construct
  source 1..20: mol_type = other RNA
tgttaataggaagttttcta

SEQ ID NO: 3281 - RNA, 20 nt, synthetic construct
  source 1..20: mol_type = other RNA
tgtgttgtttctctcttata

SEQ ID NO: 3282 - RNA, 20 nt, synthetic construct
  source 1..20: mol_type = other RNA
tgtgtcttggccaaaattcg

SEQ ID NO: 3283 - RNA, 21 nt, synthetic construct
  source 1..21: mol_type = other RNA
tgtgtaaatagtgtctagttt

SEQ ID NO: 3284 - RNA, 20 nt, synthetic construct
  source 1..20: mol_type = other RNA
tgtgtaaatagtgtctagtt

SEQ ID NO: 3285 - RNA, 20 nt, synthetic construct
  source 1..20: mol_type = other RNA
tgtgggtcaccatattcttg

SEQ ID NO: 3286 - RNA, 20 nt, synthetic construct
  source 1..20: mol_type = other RNA
tgtggagttactctcgtttt

SEQ ID NO: 3287 - RNA, 20 nt, synthetic construct
  source 1..20: mol_type = other RNA
tgtgccttgggtggctttgg

SEQ ID NO: 3288 - RNA, 20 nt, synthetic construct
  source 1..20: mol_type = other RNA
tgtgcacttcgcttcacctc

SEQ ID NO: 3289 - RNA, 20 nt, synthetic construct
  source 1..20: mol_type = other RNA
tgtgaggattcttgtcaaca

SEQ ID NO: 3290 - RNA, 20 nt, synthetic construct
  source 1..20: mol_type = other RNA
tgtctttcggagtgtggatt

SEQ ID NO: 3291 - RNA, 20 nt, synthetic construct
  source 1..20: mol_type = other RNA
tgtctttaatcctcattgga

SEQ ID NO: 3292 - RNA, 20 nt, synthetic construct
  source 1..20: mol_type = other RNA
tgtcttggtgtaaatgtata

SEQ ID NO: 3293 - RNA, 20 nt, synthetic construct
  source 1..20: mol_type = other RNA
tgtctggcgattggtggagg

SEQ ID NO: 3294 - RNA, 21 nt, synthetic construct
  source 1..21: mol_type = other RNA
tgtccttgttgggattgaagt

SEQ ID NO: 3295 - RNA, 20 nt, synthetic construct
  source 1..20: mol_type = other RNA
tgtcctactgttcaagcctc

SEQ ID NO: 3296 - RNA, 20 nt, synthetic construct
  source 1..20: mol_type = other RNA
tgtcaacactaatatgggcc

SEQ ID NO: 3297 - RNA, 20 nt, synthetic construct
  source 1..20: mol_type = other RNA
tgtatgcatgtattcaatct

SEQ ID NO: 3298 - RNA, 20 nt, synthetic construct
  source 1..20: mol_type = other RNA
tgtatgatgtgttcttgtgg

SEQ ID NO: 3299 - RNA, 20 nt, synthetic construct
  source 1..20: mol_type = other RNA
tgtatatttgcgggagagga

SEQ ID NO: 3300 - RNA, 20 nt, synthetic construct
  source 1..20: mol_type = other RNA
tgtatacccaaagacaaaag

SEQ ID NO: 3301 - RNA, 20 nt, synthetic construct
  source 1..20: mol_type = other RNA
tgtagtatgccctgagcctg

SEQ ID NO: 3302 - RNA, 20 nt, synthetic construct
  source 1..20: mol_type = other RNA
tgtaggcataaattggtctg

SEQ ID NO: 3303 - RNA, 21 nt, synthetic construct
  source 1..21: mol_type = other RNA
tgtagatcttgttcccaagaa

SEQ ID NO: 3304 - RNA, 20 nt, synthetic construct
  source 1..20: mol_type = other RNA
tgtaccaaaccttcggacgg

SEQ ID NO: 3305 - RNA, 20 nt, synthetic construct
  source 1..20: mol_type = other RNA
tgtaagttggcgagaaagtg

SEQ ID NO: 3306 - RNA, 21 nt, synthetic construct
  source 1..21: mol_type = other RNA
tgtaacacgagaaggggtcct

SEQ ID NO: 3307 - RNA, 20 nt, synthetic construct
  source 1..20: mol_type = other RNA
tgtaacacgagaaggggtcc

SEQ ID NO: 3308 - RNA, 21 nt, synthetic construct
  source 1..21: mol_type = other RNA
tgtaaatgtatattaggaaaa

SEQ ID NO: 3309 - RNA, 20 nt, synthetic construct
  source 1..20: mol_type = other RNA
tgtaaatgtatattaggaaa

SEQ ID NO: 3310 - RNA, 20 nt, synthetic construct
  source 1..20: mol_type = other RNA
tgtaaatagtgtctagtttg

SEQ ID NO: 3311 - RNA, 20 nt, synthetic construct
  source 1..20: mol_type = other RNA
tggttgaggatcctggaatt

SEQ ID NO: 3312 - RNA, 20 nt, synthetic construct
  source 1..20: mol_type = other RNA
tggttatcgctggatgtgtc

SEQ ID NO: 3313 - RNA, 20 nt, synthetic construct
  source 1..20: mol_type = other RNA
tggtgttttccaatgaggat

SEQ ID NO: 3314 - RNA, 21 nt, synthetic construct
  source 1..21: mol_type = other RNA
tggtgtaaatgtatattagga

SEQ ID NO: 3315 - RNA, 20 nt, synthetic construct
  source 1..20: mol_type = other RNA
tggtgtaaatgtatattagg

SEQ ID NO: 3316 - RNA, 20 nt, synthetic construct
  source 1..20: mol_type = other RNA
tggtggtctataagctggag

SEQ ID NO: 3317 - RNA, 20 nt, synthetic construct
  source 1..20: mol_type = other RNA
tggtggtcgggaaagaatcc

SEQ ID NO: 3318 - RNA, 20 nt, synthetic construct
  source 1..20: mol_type = other RNA
tggtggctccagttcaggag

SEQ ID NO: 3319 - RNA, 20 nt, synthetic construct
  source 1..20: mol_type = other RNA
tggtgagtgattggaggttg

SEQ ID NO: 3320 - RNA, 20 nt, synthetic construct
  source 1..20: mol_type = other RNA
tggtgaggtgaacaatgctc

SEQ ID NO: 3321 - RNA, 20 nt, synthetic construct
  source 1..20: mol_type = other RNA
tggtgacccacaaaatgagg

SEQ ID NO: 3322 - RNA, 20 nt, synthetic construct
  source 1..20: mol_type = other RNA
tggtctgcgcaccagcacca

SEQ ID NO: 3323 - RNA, 20 nt, synthetic construct
  source 1..20: mol_type = other RNA
tggtctccatgcgacgtgca

SEQ ID NO: 3324 - RNA, 21 nt, synthetic construct
  source 1..21: mol_type = other RNA
tggtctataagctggaggagt

SEQ ID NO: 3325 - RNA, 20 nt, synthetic construct
  source 1..20: mol_type = other RNA
tggtctataagctggaggag

SEQ ID NO: 3326 - RNA, 20 nt, synthetic construct
  source 1..20: mol_type = other RNA
tggtcggtcggaacggcaga

SEQ ID NO: 3327 - RNA, 20 nt, synthetic construct
  source 1..20: mol_type = other RNA
tggtcgggaaagaatcccag

SEQ ID NO: 3328 - RNA, 20 nt, synthetic construct
  source 1..20: mol_type = other RNA
tggtcccgtgctggtggttg

SEQ ID NO: 3329 - RNA, 21 nt, synthetic construct
  source 1..21: mol_type = other RNA
tgggttttgctgccccattta

SEQ ID NO: 3330 - RNA, 20 nt, synthetic construct
  source 1..20: mol_type = other RNA
tgggtttcaccccaccgcac

SEQ ID NO: 3331 - RNA, 21 nt, synthetic construct
  source 1..21: mol_type = other RNA
tgggttatgtcattggaagtt

SEQ ID NO: 3332 - RNA, 20 nt, synthetic construct
  source 1..20: mol_type = other RNA
tgggtgggtgttaatttgga

SEQ ID NO: 3333 - RNA, 21 nt, synthetic construct
  source 1..21: mol_type = other RNA
tggggttactctctgaatttt

SEQ ID NO: 3334 - RNA, 20 nt, synthetic construct
  source 1..20: mol_type = other RNA
tggggtggagccctcaggct

SEQ ID NO: 3335 - RNA, 20 nt, synthetic construct
  source 1..20: mol_type = other RNA
tggggggaactaatgactct

SEQ ID NO: 3336 - RNA, 20 nt, synthetic construct
  source 1..20: mol_type = other RNA
tgggggaggagattagatta

SEQ ID NO: 3337 - RNA, 20 nt, synthetic construct
  source 1..20: mol_type = other RNA
tggggcagaatctttccacc

SEQ ID NO: 3338 - RNA, 20 nt, synthetic construct
  source 1..20: mol_type = other RNA
tggggactgcgaattttggc

SEQ ID NO: 3339 - RNA, 20 nt, synthetic construct
  source 1..20: mol_type = other RNA
tggggaccctgcgctgaaca

SEQ ID NO: 3340 - RNA, 20 nt, synthetic construct
  source 1..20: mol_type = other RNA
tgggccatcagcgcgtgcgt

SEQ ID NO: 3341 - RNA, 20 nt, synthetic construct
  source 1..20: mol_type = other RNA
tgggattgaagtcccaatct

SEQ ID NO: 3342 - RNA, 20 nt, synthetic construct
  source 1..20: mol_type = other RNA
tgggattctttcccgaccac

SEQ ID NO: 3343 - RNA, 20 nt, synthetic construct
  source 1..20: mol_type = other RNA
tgggatcttgcagagtttgg

SEQ ID NO: 3344 - RNA, 20 nt, synthetic construct
  source 1..20: mol_type = other RNA
tgggacttcaatcccaacaa

SEQ ID NO: 3345 - RNA, 20 nt, synthetic construct
  source 1..20: mol_type = other RNA
tggctttggggcatggacat

SEQ ID NO: 3346 - RNA, 20 nt, synthetic construct
  source 1..20: mol_type = other RNA
tggctgctaggctgtgctgc

SEQ ID NO: 3347 - RNA, 20 nt, synthetic construct
  source 1..20: mol_type = other RNA
tggctccagttcaggagcag

SEQ ID NO: 3348 - RNA, 20 nt, synthetic construct
  source 1..20: mol_type = other RNA
tggcgattggtggaggcagg

SEQ ID NO: 3349 - RNA, 20 nt, synthetic construct
  source 1..20: mol_type = other RNA
tggccagacgccaacaaggt

SEQ ID NO: 3350 - RNA, 20 nt, synthetic construct
  source 1..20: mol_type = other RNA
tggccaaaattcgcagtccc

SEQ ID NO: 3351 - RNA, 21 nt, synthetic construct
  source 1..21: mol_type = other RNA
tggcagcacagcctagcagcc

SEQ ID NO: 3352 - RNA, 20 nt, synthetic construct
  source 1..20: mol_type = other RNA
tggcactagtaaactgagcc

SEQ ID NO: 3353 - RNA, 20 nt, synthetic construct
  source 1..20: mol_type = other RNA
tggcaaggacccataacttc

SEQ ID NO: 3354 - RNA, 20 nt, synthetic construct
  source 1..20: mol_type = other RNA
tggatttgctgtgtttgctc

SEQ ID NO: 3355 - RNA, 21 nt, synthetic construct
  source 1..21: mol_type = other RNA
tggatgatgtggtattggggg

SEQ ID NO: 3356 - RNA, 20 nt, synthetic construct
  source 1..20: mol_type = other RNA
tggatcggcagaggagccga

SEQ ID NO: 3357 - RNA, 20 nt, synthetic construct
  source 1..20: mol_type = other RNA
tggatccaactggtggtcgg

SEQ ID NO: 3358 - RNA, 20 nt, synthetic construct
  source 1..20: mol_type = other RNA
tggatacgatgtatatttgc

SEQ ID NO: 3359 - RNA, 20 nt, synthetic construct
  source 1..20: mol_type = other RNA
tggataaaacctagcaggca

SEQ ID NO: 3360 - RNA, 20 nt, synthetic construct
  source 1..20: mol_type = other RNA
tggactctctgcaatgtcaa

SEQ ID NO: 3361 - RNA, 20 nt, synthetic construct
  source 1..20: mol_type = other RNA
tggacatcgacccttataaa

SEQ ID NO: 3362 - RNA, 20 nt, synthetic construct
  source 1..20: mol_type = other RNA
tggaaggcgggtatattata

SEQ ID NO: 3363 - RNA, 21 nt, synthetic construct
  source 1..21: mol_type = other RNA
tggaaccttttcggctcctct

SEQ ID NO: 3364 - RNA, 20 nt, synthetic construct
  source 1..20: mol_type = other RNA
tggaaccttttcggctcctc

SEQ ID NO: 3365 - RNA, 21 nt, synthetic construct
  source 1..21: mol_type = other RNA
tggaaagtatgtcaacgaatt

SEQ ID NO: 3366 - RNA, 20 nt, synthetic construct
  source 1..20: mol_type = other RNA
tggaaaacaccatcttttcc

SEQ ID NO: 3367 - RNA, 20 nt, synthetic construct
  source 1..20: mol_type = other RNA
tgctgtagatcttgttccca

SEQ ID NO: 3368 - RNA, 20 nt, synthetic construct
  source 1..20: mol_type = other RNA
tgctgtaccaaaccttcgga

SEQ ID NO: 3369 - RNA, 20 nt, synthetic construct
  source 1..20: mol_type = other RNA
tgctgtacagacttggcccc

SEQ ID NO: 3370 - RNA, 20 nt, synthetic construct
  source 1..20: mol_type = other RNA
tgctggtggttgaggatcct

SEQ ID NO: 3371 - RNA, 21 nt, synthetic construct
  source 1..21: mol_type = other RNA
tgctggtggctccagttcagg

SEQ ID NO: 3372 - RNA, 20 nt, synthetic construct
  source 1..20: mol_type = other RNA
tgctggtggctccagttcag

SEQ ID NO: 3373 - RNA, 20 nt, synthetic construct
  source 1..20: mol_type = other RNA
tgctggcaaagtttgtagta

SEQ ID NO: 3374 - RNA, 20 nt, synthetic construct
  source 1..20: mol_type = other RNA
tgctcgcagcaggtctggag

SEQ ID NO: 3375 - RNA, 20 nt, synthetic construct
  source 1..20: mol_type = other RNA
tgctcctgaactggagccac

SEQ ID NO: 3376 - RNA, 20 nt, synthetic construct
  source 1..20: mol_type = other RNA
tgctccagacctgctgcgag

SEQ ID NO: 3377 - RNA, 20 nt, synthetic construct
  source 1..20: mol_type = other RNA
tgctaggttttatccaaagg

SEQ ID NO: 3378 - RNA, 20 nt, synthetic construct
  source 1..20: mol_type = other RNA
tgctaggctgtgctgccaac

SEQ ID NO: 3379 - RNA, 21 nt, synthetic construct
  source 1..21: mol_type = other RNA
tgcggtggggtgaaacccagc

SEQ ID NO: 3380 - RNA, 20 nt, synthetic construct
  source 1..20: mol_type = other RNA
tgcgagcaaaacaagcggct

SEQ ID NO: 3381 - RNA, 20 nt, synthetic construct
  source 1..20: mol_type = other RNA
tgcgacgtgcagaggtgaag

SEQ ID NO: 3382 - RNA, 20 nt, synthetic construct
  source 1..20: mol_type = other RNA
tgcctgctaggttttatcca

SEQ ID NO: 3383 - RNA, 20 nt, synthetic construct
  source 1..20: mol_type = other RNA
tgcctgagtgcagtatggtg

SEQ ID NO: 3384 - RNA, 20 nt, synthetic construct
  source 1..20: mol_type = other RNA
tgcctccaccaatcgccaga

SEQ ID NO: 3385 - RNA, 20 nt, synthetic construct
  source 1..20: mol_type = other RNA
tgcctacagcctcctagtac

SEQ ID NO: 3386 - RNA, 20 nt, synthetic construct
  source 1..20: mol_type = other RNA
tgccgttccgaccgaccacg

SEQ ID NO: 3387 - RNA, 20 nt, synthetic construct
  source 1..20: mol_type = other RNA
tgccgaacctgcatgactac

SEQ ID NO: 3388 - RNA, 20 nt, synthetic construct
  source 1..20: mol_type = other RNA
tgcccttgtatgcatgtatt

SEQ ID NO: 3389 - RNA, 21 nt, synthetic construct
  source 1..21: mol_type = other RNA
tgcccgtttgtcctctaattc

SEQ ID NO: 3390 - RNA, 20 nt, synthetic construct
  source 1..20: mol_type = other RNA
tgcccgtttgtcctctaatt

SEQ ID NO: 3391 - RNA, 20 nt, synthetic construct
  source 1..20: mol_type = other RNA
tgcccaaggtcttacataag

SEQ ID NO: 3392 - RNA, 20 nt, synthetic construct
  source 1..20: mol_type = other RNA
tgccacaagaacacatcata

SEQ ID NO: 3393 - RNA, 20 nt, synthetic construct
  source 1..20: mol_type = other RNA
tgcatgtattcaatctaagc

SEQ ID NO: 3394 - RNA, 20 nt, synthetic construct
  source 1..20: mol_type = other RNA
tgcatacaagggcattaacg

SEQ ID NO: 3395 - RNA, 20 nt, synthetic construct
  source 1..20: mol_type = other RNA
tgcacacggtccggcagatg

SEQ ID NO: 3396 - RNA, 20 nt, synthetic construct
  source 1..20: mol_type = other RNA
tgcaagatcccagagtgaga

SEQ ID NO: 3397 - RNA, 20 nt, synthetic construct
  source 1..20: mol_type = other RNA
tgattggaggttggggactg

SEQ ID NO: 3398 - RNA, 20 nt, synthetic construct
  source 1..20: mol_type = other RNA
tgattggaaagtatgtcaac

SEQ ID NO: 3399 - RNA, 21 nt, synthetic construct
  source 1..21: mol_type = other RNA
tgatgttctccatgttcagcg

SEQ ID NO: 3400 - RNA, 20 nt, synthetic construct
  source 1..20: mol_type = other RNA
tgatgggatgggaatacagg

SEQ ID NO: 3401 - RNA, 20 nt, synthetic construct
  source 1..20: mol_type = other RNA
tgatagtccagaagaaccaa

SEQ ID NO: 3402 - RNA, 20 nt, synthetic construct
  source 1..20: mol_type = other RNA
tgagtgtttctcaaaggtgg

SEQ ID NO: 3403 - RNA, 21 nt, synthetic construct
  source 1..21: mol_type = other RNA
tgagtgcagtatggtgaggtg

SEQ ID NO: 3404 - RNA, 20 nt, synthetic construct
  source 1..20: mol_type = other RNA
tgagtgcagtatggtgaggt

SEQ ID NO: 3405 - RNA, 20 nt, synthetic construct
  source 1..20: mol_type = other RNA
tgagtccctttttaccgctg

SEQ ID NO: 3406 - RNA, 20 nt, synthetic construct
  source 1..20: mol_type = other RNA
tgaggtgaacaatgctcagg

SEQ ID NO: 3407 - RNA, 20 nt, synthetic construct
  source 1..20: mol_type = other RNA
tgaggcatagcagcaggatg

SEQ ID NO: 3408 - RNA, 20 nt, synthetic construct
  source 1..20: mol_type = other RNA
tgaggattcttgtcaacaag

SEQ ID NO: 3409 - RNA, 20 nt, synthetic construct
  source 1..20: mol_type = other RNA
tgaggatgagtgtttctcaa

SEQ ID NO: 3410 - RNA, 20 nt, synthetic construct
  source 1..20: mol_type = other RNA
tgagcctgagggctccaccc

SEQ ID NO: 3411 - RNA, 20 nt, synthetic construct
  source 1..20: mol_type = other RNA
tgagccaggagaaacgggct

SEQ ID NO: 3412 - RNA, 20 nt, synthetic construct
  source 1..20: mol_type = other RNA
tgagatcttctgcgacgcgg

SEQ ID NO: 3413 - RNA, 20 nt, synthetic construct
  source 1..20: mol_type = other RNA
tgagaccttcgtctgcgagg

SEQ ID NO: 3414 - RNA, 20 nt, synthetic construct
  source 1..20: mol_type = other RNA
tgagaaaagaagattgcaat

SEQ ID NO: 3415 - RNA, 20 nt, synthetic construct
  source 1..20: mol_type = other RNA
tgacttctttccttcagtac

SEQ ID NO: 3416 - RNA, 21 nt, synthetic construct
  source 1..21: mol_type = other RNA
tgactactaggtctctagatg

SEQ ID NO: 3417 - RNA, 20 nt, synthetic construct
  source 1..20: mol_type = other RNA
tgacgcaacccccactggct

SEQ ID NO: 3418 - RNA, 20 nt, synthetic construct
  source 1..20: mol_type = other RNA
tgacgataagggagaggcag

SEQ ID NO: 3419 - RNA, 20 nt, synthetic construct
  source 1..20: mol_type = other RNA
tgaccaagccccagccagtg

SEQ ID NO: 3420 - RNA, 20 nt, synthetic construct
  source 1..20: mol_type = other RNA
tgacattgcagagagtccaa

SEQ ID NO: 3421 - RNA, 20 nt, synthetic construct
  source 1..20: mol_type = other RNA
tgacatactttccaatcaat

SEQ ID NO: 3422 - RNA, 21 nt, synthetic construct
  source 1..21: mol_type = other RNA
tgacataacccataaaattca

SEQ ID NO: 3423 - RNA, 20 nt, synthetic construct
  source 1..20: mol_type = other RNA
tgacataacccataaaattc

SEQ ID NO: 3424 - RNA, 20 nt, synthetic construct
  source 1..20: mol_type = other RNA
tgaaggctggatccaactgg

SEQ ID NO: 3425 - RNA, 20 nt, synthetic construct
  source 1..20: mol_type = other RNA
tgaagaggaagatgataaaa

SEQ ID NO: 3426 - RNA, 20 nt, synthetic construct
  source 1..20: mol_type = other RNA
tgaactggagccaccagcag

SEQ ID NO: 3427 - RNA, 20 nt, synthetic construct
  source 1..20: mol_type = other RNA
tgaacctttaccccgttgcc

SEQ ID NO: 3428 - RNA, 21 nt, synthetic construct
  source 1..21: mol_type = other RNA
tgaacatggagaacatcacat

SEQ ID NO: 3429 - RNA, 20 nt, synthetic construct
  source 1..20: mol_type = other RNA
tgaacatggagaacatcaca

SEQ ID NO: 3430 - RNA, 20 nt, synthetic construct
  source 1..20: mol_type = other RNA
tgaacagtaggacatgaaca

SEQ ID NO: 3431 - RNA, 20 nt, synthetic construct
  source 1..20: mol_type = other RNA
tgaacaagagatgattaggc

SEQ ID NO: 3432 - RNA, 20 nt, synthetic construct
  source 1..20: mol_type = other RNA
tgaaagccaaacagtggggg

SEQ ID NO: 3433 - RNA, 20 nt, synthetic construct
  source 1..20: mol_type = other RNA
tgaaaccacaagagttgcct

SEQ ID NO: 3434 - RNA, 20 nt, synthetic construct
  source 1..20: mol_type = other RNA
tcttttcctaatatacattt

SEQ ID NO: 3435 - RNA, 20 nt, synthetic construct
  source 1..20: mol_type = other RNA
tctttgttttgttagggttt

SEQ ID NO: 3436 - RNA, 20 nt, synthetic construct
  source 1..20: mol_type = other RNA
tctttgtactaggaggctgt

SEQ ID NO: 3437 - RNA, 20 nt, synthetic construct
  source 1..20: mol_type = other RNA
tctttgctggggggaactaa

SEQ ID NO: 3438 - RNA, 20 nt, synthetic construct
  source 1..20: mol_type = other RNA
tctttccaccagcaatcctc

SEQ ID NO: 3439 - RNA, 20 nt, synthetic construct
  source 1..20: mol_type = other RNA
tctttaatcctcattggaaa

SEQ ID NO: 3440 - RNA, 20 nt, synthetic construct
  source 1..20: mol_type = other RNA
tctttaaacaaacagtcttt

SEQ ID NO: 3441 - RNA, 20 nt, synthetic construct
  source 1..20: mol_type = other RNA
tcttgttcccaagaatatgg

SEQ ID NO: 3442 - RNA, 20 nt, synthetic construct
  source 1..20: mol_type = other RNA
tcttgtctcacttttggaag

SEQ ID NO: 3443 - RNA, 20 nt, synthetic construct
  source 1..20: mol_type = other RNA
tcttggtgtaaatgtatatt

SEQ ID NO: 3444 - RNA, 20 nt, synthetic construct
  source 1..20: mol_type = other RNA
tcttggactctctgcaatgt

SEQ ID NO: 3445 - RNA, 20 nt, synthetic construct
  source 1..20: mol_type = other RNA
tcttcttttctcattaactg

SEQ ID NO: 3446 - RNA, 20 nt, synthetic construct
  source 1..20: mol_type = other RNA
tcttctgcgacgcggcgatt

SEQ ID NO: 3447 - RNA, 20 nt, synthetic construct
  source 1..20: mol_type = other RNA
tcttctactgtacctgtctt

SEQ ID NO: 3448 - RNA, 20 nt, synthetic construct
  source 1..20: mol_type = other RNA
tcttccaaaagtgagacaag

SEQ ID NO: 3449 - RNA, 20 nt, synthetic construct
  source 1..20: mol_type = other RNA
tcttacataagaggactctt

SEQ ID NO: 3450 - RNA, 20 nt, synthetic construct
  source 1..20: mol_type = other RNA
tctgtgccttctcatctgcc

SEQ ID NO: 3451 - RNA, 20 nt, synthetic construct
  source 1..20: mol_type = other RNA
tctggcgattggtggaggca

SEQ ID NO: 3452 - RNA, 20 nt, synthetic construct
  source 1..20: mol_type = other RNA
tctggccaggtgtccttgtt

SEQ ID NO: 3453 - RNA, 21 nt, synthetic construct
  source 1..21: mol_type = other RNA
tctggagcaaacattatcggg

SEQ ID NO: 3454 - RNA, 20 nt, synthetic construct
  source 1..20: mol_type = other RNA
tctggactatcaaggtatgt

SEQ ID NO: 3455 - RNA, 20 nt, synthetic construct
  source 1..20: mol_type = other RNA
tctgccgttccgaccgacca

SEQ ID NO: 3456 - RNA, 20 nt, synthetic construct
  source 1..20: mol_type = other RNA
tctgcaagatcccagagtga

SEQ ID NO: 3457 - RNA, 21 nt, synthetic construct
  source 1..21: mol_type = other RNA
tctgacttctttccttcagta

SEQ ID NO: 3458 - RNA, 20 nt, synthetic construct
  source 1..20: mol_type = other RNA
tctcttccaaaagtgagaca

SEQ ID NO: 3459 - RNA, 20 nt, synthetic construct
  source 1..20: mol_type = other RNA
tctctcttatataatatacc

SEQ ID NO: 3460 - RNA, 20 nt, synthetic construct
  source 1..20: mol_type = other RNA
tctctagatgctggatcttc

SEQ ID NO: 3461 - RNA, 20 nt, synthetic construct
  source 1..20: mol_type = other RNA
tctcctgagcattgttcacc

SEQ ID NO: 3462 - RNA, 20 nt, synthetic construct
  source 1..20: mol_type = other RNA
tctcctcccccaactcctcc

SEQ ID NO: 3463 - RNA, 20 nt, synthetic construct
  source 1..20: mol_type = other RNA
tctccgtctgccgttccgac

SEQ ID NO: 3464 - RNA, 20 nt, synthetic construct
  source 1..20: mol_type = other RNA
tctcactctgggatcttgca

SEQ ID NO: 3465 - RNA, 20 nt, synthetic construct
  source 1..20: mol_type = other RNA
tctcaatcgccgcgtcgcag

SEQ ID NO: 3466 - RNA, 20 nt, synthetic construct
  source 1..20: mol_type = other RNA
tctcaaaggtggagacagcg

SEQ ID NO: 3467 - RNA, 20 nt, synthetic construct
  source 1..20: mol_type = other RNA
tctataagctggaggagtgc

SEQ ID NO: 3468 - RNA, 20 nt, synthetic construct
  source 1..20: mol_type = other RNA
tctataacggtttctcttcc

SEQ ID NO: 3469 - RNA, 20 nt, synthetic construct
  source 1..20: mol_type = other RNA
tctagtttggaagtaatgat

SEQ ID NO: 3470 - RNA, 20 nt, synthetic construct
  source 1..20: mol_type = other RNA
tctagttaatcattacttcc

SEQ ID NO: 3471 - RNA, 20 nt, synthetic construct
  source 1..20: mol_type = other RNA
tctagactctgcggtattgt

SEQ ID NO: 3472 - RNA, 20 nt, synthetic construct
  source 1..20: mol_type = other RNA
tctagaagatctcgtactga

SEQ ID NO: 3473 - RNA, 20 nt, synthetic construct
  source 1..20: mol_type = other RNA
tctaattccaggatcctcaa

SEQ ID NO: 3474 - RNA, 20 nt, synthetic construct
  source 1..20: mol_type = other RNA
tctaaggcttcccgatacag

SEQ ID NO: 3475 - RNA, 20 nt, synthetic construct
  source 1..20: mol_type = other RNA
tctaacaacagtagtttccg

SEQ ID NO: 3476 - RNA, 20 nt, synthetic construct
  source 1..20: mol_type = other RNA
tcgttgacatactttccaat

SEQ ID NO: 3477 - RNA, 20 nt, synthetic construct
  source 1..20: mol_type = other RNA
tcgtccgcaggattcagcgc

SEQ ID NO: 3478 - RNA, 20 nt, synthetic construct
  source 1..20: mol_type = other RNA
tcgtcaatcttctcgaggat

SEQ ID NO: 3479 - RNA, 20 nt, synthetic construct
  source 1..20: mol_type = other RNA
tcgtactgaaggaaagaagt

SEQ ID NO: 3480 - RNA, 20 nt, synthetic construct
  source 1..20: mol_type = other RNA
tcggtcgttgacattgcaga

SEQ ID NO: 3481 - RNA, 20 nt, synthetic construct
  source 1..20: mol_type = other RNA
tcggtcggaacggcagacgg

SEQ ID NO: 3482 - RNA, 20 nt, synthetic construct
  source 1..20: mol_type = other RNA
tcggcgctgaatcctgcgga

SEQ ID NO: 3483 - RNA, 20 nt, synthetic construct
  source 1..20: mol_type = other RNA
tcggcatggtcccgtgctgg

SEQ ID NO: 3484 - RNA, 20 nt, synthetic construct
  source 1..20: mol_type = other RNA
tcggaacggcagacggagaa

SEQ ID NO: 3485 - RNA, 20 nt, synthetic construct
  source 1..20: mol_type = other RNA
tcggaaaattcctatgggag

SEQ ID NO: 3486 - RNA, 20 nt, synthetic construct
  source 1..20: mol_type = other RNA
tcgcagacgaaggtctcaat

SEQ ID NO: 3487 - RNA, 20 nt, synthetic construct
  source 1..20: mol_type = other RNA
tcgcagaagatctcaatctc

SEQ ID NO: 3488 - RNA, 20 nt, synthetic construct
  source 1..20: mol_type = other RNA
tcgagaagattgacgataag

SEQ ID NO: 3489 - RNA, 20 nt, synthetic construct
  source 1..20: mol_type = other RNA
tcgacccttataaagaattt

SEQ ID NO: 3490 - RNA, 20 nt, synthetic construct
  source 1..20: mol_type = other RNA
tcctttgtttacgtcccgtc

SEQ ID NO: 3491 - RNA, 20 nt, synthetic construct
  source 1..20: mol_type = other RNA
tccttggactcataaggtgg

SEQ ID NO: 3492 - RNA, 20 nt, synthetic construct
  source 1..20: mol_type = other RNA
tccttgagcagtagtcatgc

SEQ ID NO: 3493 - RNA, 20 nt, synthetic construct
  source 1..20: mol_type = other RNA
tccttcagtacgagatcttc

SEQ ID NO: 3494 - RNA, 20 nt, synthetic construct
  source 1..20: mol_type = other RNA
tcctgtctggcgattggtgg

SEQ ID NO: 3495 - RNA, 20 nt, synthetic construct
  source 1..20: mol_type = other RNA
tcctgtcctccaacttgtcc

SEQ ID NO: 3496 - RNA, 20 nt, synthetic construct
  source 1..20: mol_type = other RNA
tcctggaattagaggacaaa

SEQ ID NO: 3497 - RNA, 20 nt, synthetic construct
  source 1..20: mol_type = other RNA
tcctgcggacgacccttctc

SEQ ID NO: 3498 - RNA, 20 nt, synthetic construct
  source 1..20: mol_type = other RNA
tcctgcctccaccaatcgcc

SEQ ID NO: 3499 - RNA, 20 nt, synthetic construct
  source 1..20: mol_type = other RNA
tcctgaactggagccaccag

SEQ ID NO: 3500 - RNA, 20 nt, synthetic construct
  source 1..20: mol_type = other RNA
tcctcttcatcctgctgcta

SEQ ID NO: 3501 - RNA, 20 nt, synthetic construct
  source 1..20: mol_type = other RNA
tcctcttatgtaagaccttg

SEQ ID NO: 3502 - RNA, 20 nt, synthetic construct
  source 1..20: mol_type = other RNA
tcctctaattccaggatcct

SEQ ID NO: 3503 - RNA, 20 nt, synthetic construct
  source 1..20: mol_type = other RNA
tcctcgagaagattgacgat

SEQ ID NO: 3504 - RNA, 20 nt, synthetic construct
  source 1..20: mol_type = other RNA
tcctccagcttatagaccac

SEQ ID NO: 3505 - RNA, 21 nt, synthetic construct
  source 1..21: mol_type = other RNA
tcctagtacaaagacctttaa

SEQ ID NO: 3506 - RNA, 20 nt, synthetic construct
  source 1..20: mol_type = other RNA
tcctagccgcttgttttgct

SEQ ID NO: 3507 - RNA, 20 nt, synthetic construct
  source 1..20: mol_type = other RNA
tcctactgttcaagcctcca

SEQ ID NO: 3508 - RNA, 21 nt, synthetic construct
  source 1..21: mol_type = other RNA
tcctaccttgttggcgtctgg

SEQ ID NO: 3509 - RNA, 20 nt, synthetic construct
  source 1..20: mol_type = other RNA
tcctaatatacatttacacc

SEQ ID NO: 3510 - RNA, 20 nt, synthetic construct
  source 1..20: mol_type = other RNA
tccgtccgaaggtttggtac

SEQ ID NO: 3511 - RNA, 20 nt, synthetic construct
  source 1..20: mol_type = other RNA
tccggcagatgagaaggcac

SEQ ID NO: 3512 - RNA, 20 nt, synthetic construct
  source 1..20: mol_type = other RNA
tccggaagtgttgataggat

SEQ ID NO: 3513 - RNA, 20 nt, synthetic construct
  source 1..20: mol_type = other RNA
tccgcaggattcagcgccga

SEQ ID NO: 3514 - RNA, 20 nt, synthetic construct
  source 1..20: mol_type = other RNA
tccgaaggtttggtacagca

SEQ ID NO: 3515 - RNA, 20 nt, synthetic construct
  source 1..20: mol_type = other RNA
tccgaaagcccaggatgatg

SEQ ID NO: 3516 - RNA, 20 nt, synthetic construct
  source 1..20: mol_type = other RNA
tccctttttaccgctgttac

SEQ ID NO: 3517 - RNA, 21 nt, synthetic construct
  source 1..21: mol_type = other RNA
tcccttatcgtcaatcttctc

SEQ ID NO: 3518 - RNA, 20 nt, synthetic construct
  source 1..20: mol_type = other RNA
tcccttatcgtcaatcttct

SEQ ID NO: 3519 - RNA, 20 nt, synthetic construct
  source 1..20: mol_type = other RNA
tccctgctggtggctccagt

SEQ ID NO: 3520 - RNA, 20 nt, synthetic construct
  source 1..20: mol_type = other RNA
tcccgaccaccagttggatc

SEQ ID NO: 3521 - RNA, 20 nt, synthetic construct
  source 1..20: mol_type = other RNA
tccccctagaaaattgagag

SEQ ID NO: 3522 - RNA, 20 nt, synthetic construct
  source 1..20: mol_type = other RNA
tccccaccttatgagtccaa

SEQ ID NO: 3523 - RNA, 21 nt, synthetic construct
  source 1..21: mol_type = other RNA
tcccatcatcctgggctttcg

SEQ ID NO: 3524 - RNA, 20 nt, synthetic construct
  source 1..20: mol_type = other RNA
tcccatcatcctgggctttc

SEQ ID NO: 3525 - RNA, 20 nt, synthetic construct
  source 1..20: mol_type = other RNA
tcccataggaattttccgaa

SEQ ID NO: 3526 - RNA, 20 nt, synthetic construct
  source 1..20: mol_type = other RNA
tcccagaggattgctggtgg

SEQ ID NO: 3527 - RNA, 20 nt, synthetic construct
  source 1..20: mol_type = other RNA
tcccaacaaggacacctggc

SEQ ID NO: 3528 - RNA, 20 nt, synthetic construct
  source 1..20: mol_type = other RNA
tccatgcgacgtgcagaggt

SEQ ID NO: 3529 - RNA, 20 nt, synthetic construct
  source 1..20: mol_type = other RNA
tccatgccccaaagccaccc

SEQ ID NO: 3530 - RNA, 20 nt, synthetic construct
  source 1..20: mol_type = other RNA
tccagttggcagcacagcct

SEQ ID NO: 3531 - RNA, 20 nt, synthetic construct
  source 1..20: mol_type = other RNA
tccagccttcagagcaaaca

SEQ ID NO: 3532 - RNA, 20 nt, synthetic construct
  source 1..20: mol_type = other RNA
tccagcatctagagacctag

SEQ ID NO: 3533 - RNA, 20 nt, synthetic construct
  source 1..20: mol_type = other RNA
tccaccccaaaaggcctccg

SEQ ID NO: 3534 - RNA, 20 nt, synthetic construct
  source 1..20: mol_type = other RNA
tccaccaatcgccagacagg

SEQ ID NO: 3535 - RNA, 20 nt, synthetic construct
  source 1..20: mol_type = other RNA
tccacactccgaaagacacc

SEQ ID NO: 3536 - RNA, 20 nt, synthetic construct
  source 1..20: mol_type = other RNA
tccaatcaataggcctgtta

SEQ ID NO: 3537 - RNA, 20 nt, synthetic construct
  source 1..20: mol_type = other RNA
tccaagagtcctcttatgta

SEQ ID NO: 3538 - RNA, 21 nt, synthetic construct
  source 1..21: mol_type = other RNA
tccaacttgtcctggttatcg

SEQ ID NO: 3539 - RNA, 20 nt, synthetic construct
  source 1..20: mol_type = other RNA
tccaactggtggtcgggaaa

SEQ ID NO: 3540 - RNA, 20 nt, synthetic construct
  source 1..20: mol_type = other RNA
tccaaattctttataagggt

SEQ ID NO: 3541 - RNA, 20 nt, synthetic construct
  source 1..20: mol_type = other RNA
tcattagttccccccagcaa

SEQ ID NO: 3542 - RNA, 20 nt, synthetic construct
  source 1..20: mol_type = other RNA
tcatccatataactgaaagc

SEQ ID NO: 3543 - RNA, 21 nt, synthetic construct
  source 1..21: mol_type = other RNA
tcagtttactagtgccatttg

SEQ ID NO: 3544 - RNA, 20 nt, synthetic construct
  source 1..20: mol_type = other RNA
tcaggtattgtttacacaga

SEQ ID NO: 3545 - RNA, 20 nt, synthetic construct
  source 1..20: mol_type = other RNA
tcagggcatactacaaactt

SEQ ID NO: 3546 - RNA, 20 nt, synthetic construct
  source 1..20: mol_type = other RNA
tcaggctcagggcatactac

SEQ ID NO: 3547 - RNA, 20 nt, synthetic construct
  source 1..20: mol_type = other RNA
tcagcccgtttctcctggct

SEQ ID NO: 3548 - RNA, 20 nt, synthetic construct
  source 1..20: mol_type = other RNA
tcagaaggcaaaaacgagag

SEQ ID NO: 3549 - RNA, 20 nt, synthetic construct
  source 1..20: mol_type = other RNA
tcactttctcgccaacttac

SEQ ID NO: 3550 - RNA, 21 nt, synthetic construct
  source 1..21: mol_type = other RNA
tcactctgggatcttgcagag

SEQ ID NO: 3551 - RNA, 20 nt, synthetic construct
  source 1..20: mol_type = other RNA
tcacctctgcacgtcgcatg

SEQ ID NO: 3552 - RNA, 20 nt, synthetic construct
  source 1..20: mol_type = other RNA
tcacctcaccatactgcact

SEQ ID NO: 3553 - RNA, 20 nt, synthetic construct
  source 1..20: mol_type = other RNA
tcaccatattcttgggaaca

SEQ ID NO: 3554 - RNA, 21 nt, synthetic construct
  source 1..21: mol_type = other RNA
tcaccatactgcactcaggca

SEQ ID NO: 3555 - RNA, 20 nt, synthetic construct
  source 1..20: mol_type = other RNA
tcaccatactgcactcaggc

SEQ ID NO: 3556 - RNA, 21 nt, synthetic construct
  source 1..21: mol_type = other RNA
tcaccaaactctgcaagatcc

SEQ ID NO: 3557 - RNA, 20 nt, synthetic construct
  source 1..20: mol_type = other RNA
tcaatcttctcgaggattgg

SEQ ID NO: 3558 - RNA, 20 nt, synthetic construct
  source 1..20: mol_type = other RNA
tcaataggcctgttaatagg

SEQ ID NO: 3559 - RNA, 20 nt, synthetic construct
  source 1..20: mol_type = other RNA
tcaaggtcggtcgttgacat

SEQ ID NO: 3560 - RNA, 20 nt, synthetic construct
  source 1..20: mol_type = other RNA
tcaagatgctgtacagactt

SEQ ID NO: 3561 - RNA, 20 nt, synthetic construct
  source 1..20: mol_type = other RNA
tcaacactaatatgggccta

SEQ ID NO: 3562 - RNA, 20 nt, synthetic construct
  source 1..20: mol_type = other RNA
tatttggtaacctttggata

SEQ ID NO: 3563 - RNA, 20 nt, synthetic construct
  source 1..20: mol_type = other RNA
tatttgcgggagaggacaac

SEQ ID NO: 3564 - RNA, 20 nt, synthetic construct
  source 1..20: mol_type = other RNA
tatttccctgctggtggctc

SEQ ID NO: 3565 - RNA, 21 nt, synthetic construct
  source 1..21: mol_type = other RNA
tatttacacactctatggaag

SEQ ID NO: 3566 - RNA, 20 nt, synthetic construct
  source 1..20: mol_type = other RNA
tatttacacactctatggaa

SEQ ID NO: 3567 - RNA, 20 nt, synthetic construct
  source 1..20: mol_type = other RNA
tattgggggccaagtctgta

SEQ ID NO: 3568 - RNA, 21 nt, synthetic construct
  source 1..21: mol_type = other RNA
tattgattggaaagtatgtca

SEQ ID NO: 3569 - RNA, 21 nt, synthetic construct
  source 1..21: mol_type = other RNA
tattcttctactgtacctgtc

SEQ ID NO: 3570 - RNA, 20 nt, synthetic construct
  source 1..20: mol_type = other RNA
tattccttggactcataagg

SEQ ID NO: 3571 - RNA, 20 nt, synthetic construct
  source 1..20: mol_type = other RNA
tattcccatcccatcatcct

SEQ ID NO: 3572 - RNA, 20 nt, synthetic construct
  source 1..20: mol_type = other RNA
tattatccagaacatctagt

SEQ ID NO: 3573 - RNA, 21 nt, synthetic construct
  source 1..21: mol_type = other RNA
tattaggaaaagatggtgttt

SEQ ID NO: 3574 - RNA, 21 nt, synthetic construct
  source 1..21: mol_type = other RNA
tattaacaggcctattgattg

SEQ ID NO: 3575 - RNA, 20 nt, synthetic construct
  source 1..20: mol_type = other RNA
tattaacaggcctattgatt

SEQ ID NO: 3576 - RNA, 20 nt, synthetic construct
  source 1..20: mol_type = other RNA
tatgttgcccgtttgtcctc

SEQ ID NO: 3577 - RNA, 20 nt, synthetic construct
  source 1..20: mol_type = other RNA
tatgtatccctcctgttgct

SEQ ID NO: 3578 - RNA, 21 nt, synthetic construct
  source 1..21: mol_type = other RNA
tatgtaagaccttgggcaaca

SEQ ID NO: 3579 - RNA, 20 nt, synthetic construct
  source 1..20: mol_type = other RNA
tatggtgaggtgaacaatgc

SEQ ID NO: 3580 - RNA, 20 nt, synthetic construct
  source 1..20: mol_type = other RNA
tatggtgacccacaaaatga

SEQ ID NO: 3581 - RNA, 20 nt, synthetic construct
  source 1..20: mol_type = other RNA
tatggatcggcagaggagcc

SEQ ID NO: 3582 - RNA, 21 nt, synthetic construct
  source 1..21: mol_type = other RNA
tatgcctgctaggttttatcc

SEQ ID NO: 3583 - RNA, 20 nt, synthetic construct
  source 1..20: mol_type = other RNA
tatgcctgctaggttttatc

SEQ ID NO: 3584 - RNA, 20 nt, synthetic construct
  source 1..20: mol_type = other RNA
tatgcctcaaggtcggtcgt

SEQ ID NO: 3585 - RNA, 20 nt, synthetic construct
  source 1..20: mol_type = other RNA
tatgatgtgttcttgtggca

SEQ ID NO: 3586 - RNA, 20 nt, synthetic construct
  source 1..20: mol_type = other RNA
tatctagaagatctcgtact

SEQ ID NO: 3587 - RNA, 20 nt, synthetic construct
  source 1..20: mol_type = other RNA
tatcctatcaacacttccgg

SEQ ID NO: 3588 - RNA, 20 nt, synthetic construct
  source 1..20: mol_type = other RNA
tatccctcctgttgctgtac

SEQ ID NO: 3589 - RNA, 20 nt, synthetic construct
  source 1..20: mol_type = other RNA
tatccatggctgctaggctg

SEQ ID NO: 3590 - RNA, 20 nt, synthetic construct
  source 1..20: mol_type = other RNA
tatcatcttcctcttcatcc

SEQ ID NO: 3591 - RNA, 21 nt, synthetic construct
  source 1..21: mol_type = other RNA
tatatttgcgggagaggacaa

SEQ ID NO: 3592 - RNA, 20 nt, synthetic construct
  source 1..20: mol_type = other RNA
tatattatataagagagaaa

SEQ ID NO: 3593 - RNA, 20 nt, synthetic construct
  source 1..20: mol_type = other RNA
tatatggatgatgtggtatt

SEQ ID NO: 3594 - RNA, 21 nt, synthetic construct
  source 1..21: mol_type = other RNA
tatagagtatttggtgtcttt

SEQ ID NO: 3595 - RNA, 20 nt, synthetic construct
  source 1..20: mol_type = other RNA
tatacatttaaaccctaaca

SEQ ID NO: 3596 - RNA, 20 nt, synthetic construct
  source 1..20: mol_type = other RNA
tataatatacccgccttcca

SEQ ID NO: 3597 - RNA, 20 nt, synthetic construct
  source 1..20: mol_type = other RNA
tataagagagaaacaacaca

SEQ ID NO: 3598 - RNA, 20 nt, synthetic construct
  source 1..20: mol_type = other RNA
tataactgaaagccaaacag

SEQ ID NO: 3599 - RNA, 20 nt, synthetic construct
  source 1..20: mol_type = other RNA
tataacggtttctcttccaa

SEQ ID NO: 3600 - RNA, 21 nt, synthetic construct
  source 1..21: mol_type = other RNA
tagtttggaagtaatgattaa

SEQ ID NO: 3601 - RNA, 20 nt, synthetic construct
  source 1..20: mol_type = other RNA
tagtttccggaagtgttgat

SEQ ID NO: 3602 - RNA, 20 nt, synthetic construct
  source 1..20: mol_type = other RNA
tagttccccctagaaaattg

SEQ ID NO: 3603 - RNA, 21 nt, synthetic construct
  source 1..21: mol_type = other RNA
tagtgttgacataactgacta

SEQ ID NO: 3604 - RNA, 20 nt, synthetic construct
  source 1..20: mol_type = other RNA
tagtccagaagaaccaacaa

SEQ ID NO: 3605 - RNA, 20 nt, synthetic construct
  source 1..20: mol_type = other RNA
tagtattccttggactcata

SEQ ID NO: 3606 - RNA, 20 nt, synthetic construct
  source 1..20: mol_type = other RNA
tagtatgccctgagcctgag

SEQ ID NO: 3607 - RNA, 20 nt, synthetic construct
  source 1..20: mol_type = other RNA
tagtacaaagacctttaatc

SEQ ID NO: 3608 - RNA, 20 nt, synthetic construct
  source 1..20: mol_type = other RNA
tagggtttaaatgtataccc

SEQ ID NO: 3609 - RNA, 20 nt, synthetic construct
  source 1..20: mol_type = other RNA
taggggcatttggtggtcta

SEQ ID NO: 3610 - RNA, 20 nt, synthetic construct
  source 1..20: mol_type = other RNA
tagggctttcccccactgtt

SEQ ID NO: 3611 - RNA, 20 nt, synthetic construct
  source 1..20: mol_type = other RNA
taggctgccttcctgtctgg

SEQ ID NO: 3612 - RNA, 20 nt, synthetic construct
  source 1..20: mol_type = other RNA
taggcccacttacagttaat

SEQ ID NO: 3613 - RNA, 21 nt, synthetic construct
  source 1..21: mol_type = other RNA
taggcagaggtgaaaaagttg

SEQ ID NO: 3614 - RNA, 20 nt, synthetic construct
  source 1..20: mol_type = other RNA
taggaccccttctcgtgtta

SEQ ID NO: 3615 - RNA, 20 nt, synthetic construct
  source 1..20: mol_type = other RNA
taggaattttccgaaagccc

SEQ ID NO: 3616 - RNA, 20 nt, synthetic construct
  source 1..20: mol_type = other RNA
taggaaaagatggtgttttc

SEQ ID NO: 3617 - RNA, 20 nt, synthetic construct
  source 1..20: mol_type = other RNA
tagctccaaattctttataa

SEQ ID NO: 3618 - RNA, 21 nt, synthetic construct
  source 1..21: mol_type = other RNA
tagccgcttgttttgctcgca

SEQ ID NO: 3619 - RNA, 20 nt, synthetic construct
  source 1..20: mol_type = other RNA
tagccgcttgttttgctcgc

SEQ ID NO: 3620 - RNA, 21 nt, synthetic construct
  source 1..21: mol_type = other RNA
tagcagcaggatgaagaggaa

SEQ ID NO: 3621 - RNA, 20 nt, synthetic construct
  source 1..20: mol_type = other RNA
tagcagcaggatgaagagga

SEQ ID NO: 3622 - RNA, 20 nt, synthetic construct
  source 1..20: mol_type = other RNA
tagattgaatacatgcatac

SEQ ID NO: 3623 - RNA, 20 nt, synthetic construct
  source 1..20: mol_type = other RNA
tagattaaaggtctttgtac

SEQ ID NO: 3624 - RNA, 21 nt, synthetic construct
  source 1..21: mol_type = other RNA
tagatgttctggataataagg

SEQ ID NO: 3625 - RNA, 20 nt, synthetic construct
  source 1..20: mol_type = other RNA
tagagtgtgtaaatagtgtc

SEQ ID NO: 3626 - RNA, 20 nt, synthetic construct
  source 1..20: mol_type = other RNA
tagagtcattagttcccccc

SEQ ID NO: 3627 - RNA, 20 nt, synthetic construct
  source 1..20: mol_type = other RNA
tagagtatttggtgtctttc

SEQ ID NO: 3628 - RNA, 20 nt, synthetic construct
  source 1..20: mol_type = other RNA
tagactctgcggtattgtga

SEQ ID NO: 3629 - RNA, 20 nt, synthetic construct
  source 1..20: mol_type = other RNA
tagaagatctcgtactgaag

SEQ ID NO: 3630 - RNA, 20 nt, synthetic construct
  source 1..20: mol_type = other RNA
tagaagaataaagaccagta

SEQ ID NO: 3631 - RNA, 20 nt, synthetic construct
  source 1..20: mol_type = other RNA
tagaaaacttcctattaaca

SEQ ID NO: 3632 - RNA, 20 nt, synthetic construct
  source 1..20: mol_type = other RNA
tacttcaaagactgtttgtt

SEQ ID NO: 3633 - RNA, 20 nt, synthetic construct
  source 1..20: mol_type = other RNA
tactgcctctcccttatcgt

SEQ ID NO: 3634 - RNA, 20 nt, synthetic construct
  source 1..20: mol_type = other RNA
tactgaaggaaagaagtcag

SEQ ID NO: 3635 - RNA, 20 nt, synthetic construct
  source 1..20: mol_type = other RNA
tactagtgccatttgttcag

SEQ ID NO: 3636 - RNA, 20 nt, synthetic construct
  source 1..20: mol_type = other RNA
tactaggaggctgtaggcat

SEQ ID NO: 3637 - RNA, 20 nt, synthetic construct
  source 1..20: mol_type = other RNA
tacgatgtatatttgcggga

SEQ ID NO: 3638 - RNA, 20 nt, synthetic construct
  source 1..20: mol_type = other RNA
taccttgttggcgtctggcc

SEQ ID NO: 3639 - RNA, 20 nt, synthetic construct
  source 1..20: mol_type = other RNA
tacctgtctttaatcctcat

SEQ ID NO: 3640 - RNA, 20 nt, synthetic construct
  source 1..20: mol_type = other RNA
tacctgggtgggtgttaatt

SEQ ID NO: 3641 - RNA, 20 nt, synthetic construct
  source 1..20: mol_type = other RNA
tacctgaacctttaccccgt

SEQ ID NO: 3642 - RNA, 20 nt, synthetic construct
  source 1..20: mol_type = other RNA
taccgcctcagctctgtatc

SEQ ID NO: 3643 - RNA, 21 nt, synthetic construct
  source 1..21: mol_type = other RNA
tacccgccttccatagagtgt

SEQ ID NO: 3644 - RNA, 21 nt, synthetic construct
  source 1..21: mol_type = other RNA
taccccgttgcccggcaacgg

SEQ ID NO: 3645 - RNA, 20 nt, synthetic construct
  source 1..20: mol_type = other RNA
taccccgctgtctccacctt

SEQ ID NO: 3646 - RNA, 20 nt, synthetic construct
  source 1..20: mol_type = other RNA
taccattggataagggtatt

SEQ ID NO: 3647 - RNA, 20 nt, synthetic construct
  source 1..20: mol_type = other RNA
taccaattttcttttgtctt

SEQ ID NO: 3648 - RNA, 20 nt, synthetic construct
  source 1..20: mol_type = other RNA
tacatcgtatccatggctgc

SEQ ID NO: 3649 - RNA, 20 nt, synthetic construct
  source 1..20: mol_type = other RNA
tacagtagaagaataaagac

SEQ ID NO: 3650 - RNA, 20 nt, synthetic construct
  source 1..20: mol_type = other RNA
tacaggtgcaatttccgtcc

SEQ ID NO: 3651 - RNA, 20 nt, synthetic construct
  source 1..20: mol_type = other RNA
tacagagctgaggcggtatc

SEQ ID NO: 3652 - RNA, 20 nt, synthetic construct
  source 1..20: mol_type = other RNA
tacaccaagacattatcaaa

SEQ ID NO: 3653 - RNA, 21 nt, synthetic construct
  source 1..21: mol_type = other RNA
tacaaactgttcacatttttt

SEQ ID NO: 3654 - RNA, 20 nt, synthetic construct
  source 1..20: mol_type = other RNA
tacaaactgttcacattttt

SEQ ID NO: 3655 - RNA, 21 nt, synthetic construct
  source 1..21: mol_type = other RNA
taatgcccttgtatgcatgta

SEQ ID NO: 3656 - RNA, 20 nt, synthetic construct
  source 1..20: mol_type = other RNA
taatgattaactagatgttc

SEQ ID NO: 3657 - RNA, 21 nt, synthetic construct
  source 1..21: mol_type = other RNA
taatgagaaaagaagattgca

SEQ ID NO: 3658 - RNA, 21 nt, synthetic construct
  source 1..21: mol_type = other RNA
taatctcctcccccaactcct

SEQ ID NO: 3659 - RNA, 20 nt, synthetic construct
  source 1..20: mol_type = other RNA
taatatgggcctaaagttca

SEQ ID NO: 3660 - RNA, 20 nt, synthetic construct
  source 1..20: mol_type = other RNA
taatatacccgccttccata

SEQ ID NO: 3661 - RNA, 20 nt, synthetic construct
  source 1..20: mol_type = other RNA
taatacccttatccaatggt

SEQ ID NO: 3662 - RNA, 21 nt, synthetic construct
  source 1..21: mol_type = other RNA
taataaggtttaataccctta

SEQ ID NO: 3663 - RNA, 20 nt, synthetic construct
  source 1..20: mol_type = other RNA
taagttggcgagaaagtgaa

SEQ ID NO: 3664 - RNA, 21 nt, synthetic construct
  source 1..21: mol_type = other RNA
taaggtttaatacccttatcc

SEQ ID NO: 3665 - RNA, 20 nt, synthetic construct
  source 1..20: mol_type = other RNA
taaggtttaatacccttatc

SEQ ID NO: 3666 - RNA, 20 nt, synthetic construct
  source 1..20: mol_type = other RNA
taagggagaggcagtagtcg

SEQ ID NO: 3667 - RNA, 20 nt, synthetic construct
  source 1..20: mol_type = other RNA
taagcaggctttcactttct

SEQ ID NO: 3668 - RNA, 21 nt, synthetic construct
  source 1..21: mol_type = other RNA
taagaggactcttggactctc

SEQ ID NO: 3669 - RNA, 20 nt, synthetic construct
  source 1..20: mol_type = other RNA
taactgactactaggtctct

SEQ ID NO: 3670 - RNA, 20 nt, synthetic construct
  source 1..20: mol_type = other RNA
taactgaaagccaaacagtg

SEQ ID NO: 3671 - RNA, 20 nt, synthetic construct
  source 1..20: mol_type = other RNA
taactagatgttctggataa

SEQ ID NO: 3672 - RNA, 20 nt, synthetic construct
  source 1..20: mol_type = other RNA
taaccaggacaagttggagg

SEQ ID NO: 3673 - RNA, 20 nt, synthetic construct
  source 1..20: mol_type = other RNA
taaccacattgtgtaaatgg

SEQ ID NO: 3674 - RNA, 21 nt, synthetic construct
  source 1..21: mol_type = other RNA
taacattgaggttcccgagat

SEQ ID NO: 3675 - RNA, 20 nt, synthetic construct
  source 1..20: mol_type = other RNA
taacaggcctattgattgga

SEQ ID NO: 3676 - RNA, 21 nt, synthetic construct
  source 1..21: mol_type = other RNA
taacagcggtaaaaagggact

SEQ ID NO: 3677 - RNA, 20 nt, synthetic construct
  source 1..20: mol_type = other RNA
taacacgagaaggggtccta

SEQ ID NO: 3678 - RNA, 20 nt, synthetic construct
  source 1..20: mol_type = other RNA
taacacccacccaggtagct

SEQ ID NO: 3679 - RNA, 20 nt, synthetic construct
  source 1..20: mol_type = other RNA
taaatgtatacccaaagaca

SEQ ID NO: 3680 - RNA, 20 nt, synthetic construct
  source 1..20: mol_type = other RNA
taaatggggcagcaaaaccc

SEQ ID NO: 3681 - RNA, 20 nt, synthetic construct
  source 1..20: mol_type = other RNA
taaagttcaggcaactcttg

SEQ ID NO: 3682 - RNA, 20 nt, synthetic construct
  source 1..20: mol_type = other RNA
taaaggtctttgtactagga

SEQ ID NO: 3683 - RNA, 21 nt, synthetic construct
  source 1..21: mol_type = other RNA
taaagagaggtgcgccccgtg

SEQ ID NO: 3684 - RNA, 20 nt, synthetic construct
  source 1..20: mol_type = other RNA
taaagactgggaggagttgg

SEQ ID NO: 3685 - RNA, 20 nt, synthetic construct
  source 1..20: mol_type = other RNA
taaagacaggtacagtagaa

SEQ ID NO: 3686 - RNA, 20 nt, synthetic construct
  source 1..20: mol_type = other RNA
taaagaatttggagctactg

SEQ ID NO: 3687 - RNA, 20 nt, synthetic construct
  source 1..20: mol_type = other RNA
taaactgagccaggagaaac

SEQ ID NO: 3688 - RNA, 21 nt, synthetic construct
  source 1..21: mol_type = other RNA
taaaccttattatccagaaca

SEQ ID NO: 3689 - RNA, 20 nt, synthetic construct
  source 1..20: mol_type = other RNA
taaaccctaacaaaacaaag

SEQ ID NO: 3690 - RNA, 20 nt, synthetic construct
  source 1..20: mol_type = other RNA
taaacaaaggacgtcccgcg

SEQ ID NO: 3691 - RNA, 20 nt, synthetic construct
  source 1..20: mol_type = other RNA
taaaacgccgcagacacatc

SEQ ID NO: 3692 - RNA, 20 nt, synthetic construct
  source 1..20: mol_type = other RNA
taaaacctagcaggcataat

SEQ ID NO: 3693 - RNA, 20 nt, synthetic construct
  source 1..20: mol_type = other RNA
gttttgctgccccatttaca

SEQ ID NO: 3694 - RNA, 20 nt, synthetic construct
  source 1..20: mol_type = other RNA
gttttgctcgcagcaggtct

SEQ ID NO: 3695 - RNA, 20 nt, synthetic construct
  source 1..20: mol_type = other RNA
gtttgtttaaagactgggag

SEQ ID NO: 3696 - RNA, 20 nt, synthetic construct
  source 1..20: mol_type = other RNA
gtttggtacagcaacaggag

SEQ ID NO: 3697 - RNA, 20 nt, synthetic construct
  source 1..20: mol_type = other RNA
gtttggaagtaatgattaac

SEQ ID NO: 3698 - RNA, 20 nt, synthetic construct
  source 1..20: mol_type = other RNA
gtttgctccagacctgctgc

SEQ ID NO: 3699 - RNA, 21 nt, synthetic construct
  source 1..21: mol_type = other RNA
gtttctcaaaggtggagacag

SEQ ID NO: 3700 - RNA, 20 nt, synthetic construct
  source 1..20: mol_type = other RNA
gtttcaccccaccgcacgga

SEQ ID NO: 3701 - RNA, 20 nt, synthetic construct
  source 1..20: mol_type = other RNA
gtttactgctcctgaactgg

SEQ ID NO: 3702 - RNA, 21 nt, synthetic construct
  source 1..21: mol_type = other RNA
gtttactagtgccatttgttc

SEQ ID NO: 3703 - RNA, 20 nt, synthetic construct
  source 1..20: mol_type = other RNA
gtttactagtgccatttgtt

SEQ ID NO: 3704 - RNA, 20 nt, synthetic construct
  source 1..20: mol_type = other RNA
gtttacgtcccgtcggcgct

SEQ ID NO: 3705 - RNA, 20 nt, synthetic construct
  source 1..20: mol_type = other RNA
gtttacacagaaaggccttg

SEQ ID NO: 3706 - RNA, 21 nt, synthetic construct
  source 1..21: mol_type = other RNA
gtttaatacccttatccaatg

SEQ ID NO: 3707 - RNA, 20 nt, synthetic construct
  source 1..20: mol_type = other RNA
gtttaaagactgggaggagt

SEQ ID NO: 3708 - RNA, 20 nt, synthetic construct
  source 1..20: mol_type = other RNA
gttggttcttctggactatc

SEQ ID NO: 3709 - RNA, 20 nt, synthetic construct
  source 1..20: mol_type = other RNA
gttggtgagtgattggaggt

SEQ ID NO: 3710 - RNA, 21 nt, synthetic construct
  source 1..21: mol_type = other RNA
gttgggggaggagattagatt

SEQ ID NO: 3711 - RNA, 20 nt, synthetic construct
  source 1..20: mol_type = other RNA
gttgggggaggagattagat

SEQ ID NO: 3712 - RNA, 20 nt, synthetic construct
  source 1..20: mol_type = other RNA
gttggatccagccttcagag

SEQ ID NO: 3713 - RNA, 20 nt, synthetic construct
  source 1..20: mol_type = other RNA
gttggaggacaggaggttgg

SEQ ID NO: 3714 - RNA, 20 nt, synthetic construct
  source 1..20: mol_type = other RNA
gttgccgggcaacggggtaa

SEQ ID NO: 3715 - RNA, 20 nt, synthetic construct
  source 1..20: mol_type = other RNA
gttgcccaaggtcttacata

SEQ ID NO: 3716 - RNA, 20 nt, synthetic construct
  source 1..20: mol_type = other RNA
gttgcatggtgctggtgcgc

SEQ ID NO: 3717 - RNA, 21 nt, synthetic construct
  source 1..21: mol_type = other RNA
gttgataggataggggcattt

SEQ ID NO: 3718 - RNA, 20 nt, synthetic construct
  source 1..20: mol_type = other RNA
gttgataggataggggcatt

SEQ ID NO: 3719 - RNA, 20 nt, synthetic construct
  source 1..20: mol_type = other RNA
gttgaggatcctggaattag

SEQ ID NO: 3720 - RNA, 20 nt, synthetic construct
  source 1..20: mol_type = other RNA
gttgacattgcagagagtcc

SEQ ID NO: 3721 - RNA, 20 nt, synthetic construct
  source 1..20: mol_type = other RNA
gttcttgtggcaaggaccca

SEQ ID NO: 3722 - RNA, 20 nt, synthetic construct
  source 1..20: mol_type = other RNA
gttccgcagtatggatcggc

SEQ ID NO: 3723 - RNA, 20 nt, synthetic construct
  source 1..20: mol_type = other RNA
gttccccctagaaaattgag

SEQ ID NO: 3724 - RNA, 21 nt, synthetic construct
  source 1..21: mol_type = other RNA
gttccccaccttatgagtcca

SEQ ID NO: 3725 - RNA, 20 nt, synthetic construct
  source 1..20: mol_type = other RNA
gttccccaccttatgagtcc

SEQ ID NO: 3726 - RNA, 20 nt, synthetic construct
  source 1..20: mol_type = other RNA
gttcaggtattgtttacaca

SEQ ID NO: 3727 - RNA, 21 nt, synthetic construct
  source 1..21: mol_type = other RNA
gttcacattttttgataatgt

SEQ ID NO: 3728 - RNA, 20 nt, synthetic construct
  source 1..20: mol_type = other RNA
gttatgtcattggaagttat

SEQ ID NO: 3729 - RNA, 20 nt, synthetic construct
  source 1..20: mol_type = other RNA
gttatgtcaacactaatatg

SEQ ID NO: 3730 - RNA, 20 nt, synthetic construct
  source 1..20: mol_type = other RNA
gttatgggtccttgccacaa

SEQ ID NO: 3731 - RNA, 20 nt, synthetic construct
  source 1..20: mol_type = other RNA
gttatcgctggatgtgtctg

SEQ ID NO: 3732 - RNA, 20 nt, synthetic construct
  source 1..20: mol_type = other RNA
gttagtattccttggactca

SEQ ID NO: 3733 - RNA, 21 nt, synthetic construct
  source 1..21: mol_type = other RNA
gttaccaattttcttttgtct

SEQ ID NO: 3734 - RNA, 20 nt, synthetic construct
  source 1..20: mol_type = other RNA
gttaccaaatatttaccatt

SEQ ID NO: 3735 - RNA, 20 nt, synthetic construct
  source 1..20: mol_type = other RNA
gttaatcattacttccaaac

SEQ ID NO: 3736 - RNA, 20 nt, synthetic construct
  source 1..20: mol_type = other RNA
gtgttttccaatgaggatta

SEQ ID NO: 3737 - RNA, 20 nt, synthetic construct
  source 1..20: mol_type = other RNA
gtgtttctcaaaggtggaga

SEQ ID NO: 3738 - RNA, 20 nt, synthetic construct
  source 1..20: mol_type = other RNA
gtgttgacataactgactac

SEQ ID NO: 3739 - RNA, 20 nt, synthetic construct
  source 1..20: mol_type = other RNA
gtgtggattcgcactcctcc

SEQ ID NO: 3740 - RNA, 20 nt, synthetic construct
  source 1..20: mol_type = other RNA
gtgtaaatgtatattaggaa

SEQ ID NO: 3741 - RNA, 20 nt, synthetic construct
  source 1..20: mol_type = other RNA
gtgtaaatagtgtctagttt

SEQ ID NO: 3742 - RNA, 20 nt, synthetic construct
  source 1..20: mol_type = other RNA
gtggttgaggatcctggaat

SEQ ID NO: 3743 - RNA, 20 nt, synthetic construct
  source 1..20: mol_type = other RNA
gtggtcgggaaagaatccca

SEQ ID NO: 3744 - RNA, 20 nt, synthetic construct
  source 1..20: mol_type = other RNA
gtgggtcttttgggttttgc

SEQ ID NO: 3745 - RNA, 20 nt, synthetic construct
  source 1..20: mol_type = other RNA
gtgggtcaccatattcttgg

SEQ ID NO: 3746 - RNA, 20 nt, synthetic construct
  source 1..20: mol_type = other RNA
gtggaggcaggaggcggatt

SEQ ID NO: 3747 - RNA, 20 nt, synthetic construct
  source 1..20: mol_type = other RNA
gtggagacagcggggtaggc

SEQ ID NO: 3748 - RNA, 20 nt, synthetic construct
  source 1..20: mol_type = other RNA
gtggacttctctcaattttc

SEQ ID NO: 3749 - RNA, 20 nt, synthetic construct
  source 1..20: mol_type = other RNA
gtgctggtggttgaggatcc

SEQ ID NO: 3750 - RNA, 20 nt, synthetic construct
  source 1..20: mol_type = other RNA
gtgctgccaactggatcctg

SEQ ID NO: 3751 - RNA, 20 nt, synthetic construct
  source 1..20: mol_type = other RNA
gtgcgccccgtggtcggtcg

SEQ ID NO: 3752 - RNA, 20 nt, synthetic construct
  source 1..20: mol_type = other RNA
gtgcgaatccacactccgaa

SEQ ID NO: 3753 - RNA, 20 nt, synthetic construct
  source 1..20: mol_type = other RNA
gtgccaagtgtttgctgacg

SEQ ID NO: 3754 - RNA, 20 nt, synthetic construct
  source 1..20: mol_type = other RNA
gtgcagtatggtgaggtgaa

SEQ ID NO: 3755 - RNA, 20 nt, synthetic construct
  source 1..20: mol_type = other RNA
gtgcacacggtccggcagat

SEQ ID NO: 3756 - RNA, 20 nt, synthetic construct
  source 1..20: mol_type = other RNA
gtgatgttctccatgttcag

SEQ ID NO: 3757 - RNA, 20 nt, synthetic construct
  source 1..20: mol_type = other RNA
gtgaggtgaacaatgctcag

SEQ ID NO: 3758 - RNA, 20 nt, synthetic construct
  source 1..20: mol_type = other RNA
gtgaggattcttgtcaacaa

SEQ ID NO: 3759 - RNA, 21 nt, synthetic construct
  source 1..21: mol_type = other RNA
gtgagaggcctgtatttccct

SEQ ID NO: 3760 - RNA, 20 nt, synthetic construct
  source 1..20: mol_type = other RNA
gtgagaggcctgtatttccc

SEQ ID NO: 3761 - RNA, 20 nt, synthetic construct
  source 1..20: mol_type = other RNA
gtgaaaccacaagagttgcc

SEQ ID NO: 3762 - RNA, 20 nt, synthetic construct
  source 1..20: mol_type = other RNA
gtgaaaaagttgcatggtgc

SEQ ID NO: 3763 - RNA, 20 nt, synthetic construct
  source 1..20: mol_type = other RNA
gtctttgtactaggaggctg

SEQ ID NO: 3764 - RNA, 21 nt, synthetic construct
  source 1..21: mol_type = other RNA
gtctttgaagtatgcctcaag

SEQ ID NO: 3765 - RNA, 20 nt, synthetic construct
  source 1..20: mol_type = other RNA
gtctttaaacaaacagtctt

SEQ ID NO: 3766 - RNA, 20 nt, synthetic construct
  source 1..20: mol_type = other RNA
gtcttggtgtaaatgtatat

SEQ ID NO: 3767 - RNA, 20 nt, synthetic construct
  source 1..20: mol_type = other RNA
gtcttacataagaggactct

SEQ ID NO: 3768 - RNA, 20 nt, synthetic construct
  source 1..20: mol_type = other RNA
gtctgtgccttctcatctgc

SEQ ID NO: 3769 - RNA, 20 nt, synthetic construct
  source 1..20: mol_type = other RNA
gtctggcgattggtggaggc

SEQ ID NO: 3770 - RNA, 20 nt, synthetic construct
  source 1..20: mol_type = other RNA
gtctggccaggtgtccttgt

SEQ ID NO: 3771 - RNA, 20 nt, synthetic construct
  source 1..20: mol_type = other RNA
gtctggagcaaacattatcg

SEQ ID NO: 3772 - RNA, 20 nt, synthetic construct
  source 1..20: mol_type = other RNA
gtctgcgcaccagcaccatg

SEQ ID NO: 3773 - RNA, 20 nt, synthetic construct
  source 1..20: mol_type = other RNA
gtctataagctggaggagtg

SEQ ID NO: 3774 - RNA, 21 nt, synthetic construct
  source 1..21: mol_type = other RNA
gtctagactctgcggtattgt

SEQ ID NO: 3775 - RNA, 20 nt, synthetic construct
  source 1..20: mol_type = other RNA
gtctagactctgcggtattg

SEQ ID NO: 3776 - RNA, 20 nt, synthetic construct
  source 1..20: mol_type = other RNA
gtctaacaacagtagtttcc

SEQ ID NO: 3777 - RNA, 20 nt, synthetic construct
  source 1..20: mol_type = other RNA
gtcggtcgttgacattgcag

SEQ ID NO: 3778 - RNA, 20 nt, synthetic construct
  source 1..20: mol_type = other RNA
gtcggtcggaacggcagacg

SEQ ID NO: 3779 - RNA, 20 nt, synthetic construct
  source 1..20: mol_type = other RNA
gtcggaacggcagacggaga

SEQ ID NO: 3780 - RNA, 20 nt, synthetic construct
  source 1..20: mol_type = other RNA
gtcgcagaagatctcaatct

SEQ ID NO: 3781 - RNA, 20 nt, synthetic construct
  source 1..20: mol_type = other RNA
gtcctttgtttacgtcccgt

SEQ ID NO: 3782 - RNA, 20 nt, synthetic construct
  source 1..20: mol_type = other RNA
gtcctcttatgtaagacctt

SEQ ID NO: 3783 - RNA, 20 nt, synthetic construct
  source 1..20: mol_type = other RNA
gtcctactgttcaagcctcc

SEQ ID NO: 3784 - RNA, 20 nt, synthetic construct
  source 1..20: mol_type = other RNA
gtccggcagatgagaaggca

SEQ ID NO: 3785 - RNA, 20 nt, synthetic construct
  source 1..20: mol_type = other RNA
gtcccgtcggcgctgaatcc

SEQ ID NO: 3786 - RNA, 20 nt, synthetic construct
  source 1..20: mol_type = other RNA
gtcccgcgcaggatccagtt

SEQ ID NO: 3787 - RNA, 20 nt, synthetic construct
  source 1..20: mol_type = other RNA
gtcccgataatgtttgctcc

SEQ ID NO: 3788 - RNA, 20 nt, synthetic construct
  source 1..20: mol_type = other RNA
gtcccaagcgaccccgagaa

SEQ ID NO: 3789 - RNA, 20 nt, synthetic construct
  source 1..20: mol_type = other RNA
gtccatgccccaaagccacc

SEQ ID NO: 3790 - RNA, 20 nt, synthetic construct
  source 1..20: mol_type = other RNA
gtccagaagaaccaacaaga

SEQ ID NO: 3791 - RNA, 20 nt, synthetic construct
  source 1..20: mol_type = other RNA
gtccaaggaatactaacatt

SEQ ID NO: 3792 - RNA, 20 nt, synthetic construct
  source 1..20: mol_type = other RNA
gtccaagagtcctcttatgt

SEQ ID NO: 3793 - RNA, 20 nt, synthetic construct
  source 1..20: mol_type = other RNA
gtcattagttccccccagca

SEQ ID NO: 3794 - RNA, 20 nt, synthetic construct
  source 1..20: mol_type = other RNA
gtcaccatattcttgggaac

SEQ ID NO: 3795 - RNA, 20 nt, synthetic construct
  source 1..20: mol_type = other RNA
gtcaatcttctcgaggattg

SEQ ID NO: 3796 - RNA, 20 nt, synthetic construct
  source 1..20: mol_type = other RNA
gtcaacactaatatgggcct

SEQ ID NO: 3797 - RNA, 21 nt, synthetic construct
  source 1..21: mol_type = other RNA
gtatttggtgtctttcggagt

SEQ ID NO: 3798 - RNA, 20 nt, synthetic construct
  source 1..20: mol_type = other RNA
gtattcccatcccatcatcc

SEQ ID NO: 3799 - RNA, 20 nt, synthetic construct
  source 1..20: mol_type = other RNA
gtattaaaccttattatcca

SEQ ID NO: 3800 - RNA, 20 nt, synthetic construct
  source 1..20: mol_type = other RNA
gtatggatcggcagaggagc

SEQ ID NO: 3801 - RNA, 20 nt, synthetic construct
  source 1..20: mol_type = other RNA
gtatgcatgtattcaatcta

SEQ ID NO: 3802 - RNA, 20 nt, synthetic construct
  source 1..20: mol_type = other RNA
gtatgatgtgttcttgtggc

SEQ ID NO: 3803 - RNA, 20 nt, synthetic construct
  source 1..20: mol_type = other RNA
gtatctagaagatctcgtac

SEQ ID NO: 3804 - RNA, 20 nt, synthetic construct
  source 1..20: mol_type = other RNA
gtatacccaaagacaaaaga

SEQ ID NO: 3805 - RNA, 20 nt, synthetic construct
  source 1..20: mol_type = other RNA
gtatacatttaaaccctaac

SEQ ID NO: 3806 - RNA, 20 nt, synthetic construct
  source 1..20: mol_type = other RNA
gtagtttccggaagtgttga

SEQ ID NO: 3807 - RNA, 20 nt, synthetic construct
  source 1..20: mol_type = other RNA
gtagttccccctagaaaatt

SEQ ID NO: 3808 - RNA, 20 nt, synthetic construct
  source 1..20: mol_type = other RNA
gtagtcggaacagggtttac

SEQ ID NO: 3809 - RNA, 20 nt, synthetic construct
  source 1..20: mol_type = other RNA
gtagtcatgcaggttcggca

SEQ ID NO: 3810 - RNA, 20 nt, synthetic construct
  source 1..20: mol_type = other RNA
gtagtcagttatgtcaacac

SEQ ID NO: 3811 - RNA, 20 nt, synthetic construct
  source 1..20: mol_type = other RNA
gtagtatgccctgagcctga

SEQ ID NO: 3812 - RNA, 20 nt, synthetic construct
  source 1..20: mol_type = other RNA
gtaggcccacttacagttaa

SEQ ID NO: 3813 - RNA, 20 nt, synthetic construct
  source 1..20: mol_type = other RNA
gtaggcataaattggtctgc

SEQ ID NO: 3814 - RNA, 21 nt, synthetic construct
  source 1..21: mol_type = other RNA
gtaggagctggagcattcggg

SEQ ID NO: 3815 - RNA, 20 nt, synthetic construct
  source 1..20: mol_type = other RNA
gtagctccaaattctttata

SEQ ID NO: 3816 - RNA, 20 nt, synthetic construct
  source 1..20: mol_type = other RNA
gtagaagaataaagaccagt

SEQ ID NO: 3817 - RNA, 20 nt, synthetic construct
  source 1..20: mol_type = other RNA
gtactgaaggaaagaagtca

SEQ ID NO: 3818 - RNA, 20 nt, synthetic construct
  source 1..20: mol_type = other RNA
gtactaggaggctgtaggca

SEQ ID NO: 3819 - RNA, 20 nt, synthetic construct
  source 1..20: mol_type = other RNA
gtacgagatcttctagatac

SEQ ID NO: 3820 - RNA, 20 nt, synthetic construct
  source 1..20: mol_type = other RNA
gtaagttggcgagaaagtga

SEQ ID NO: 3821 - RNA, 20 nt, synthetic construct
  source 1..20: mol_type = other RNA
gtaagaccttgggcaacatt

SEQ ID NO: 3822 - RNA, 20 nt, synthetic construct
  source 1..20: mol_type = other RNA
gtaacctttggataaaacct

SEQ ID NO: 3823 - RNA, 20 nt, synthetic construct
  source 1..20: mol_type = other RNA
gtaacacgagaaggggtcct

SEQ ID NO: 3824 - RNA, 20 nt, synthetic construct
  source 1..20: mol_type = other RNA
gtaaatggggcagcaaaacc

SEQ ID NO: 3825 - RNA, 20 nt, synthetic construct
  source 1..20: mol_type = other RNA
gtaaatatttggtaaccttt

SEQ ID NO: 3826 - RNA, 21 nt, synthetic construct
  source 1..21: mol_type = other RNA
gtaaatagtgtctagtttgga

SEQ ID NO: 3827 - RNA, 20 nt, synthetic construct
  source 1..20: mol_type = other RNA
gtaaatagtgtctagtttgg

SEQ ID NO: 3828 - RNA, 20 nt, synthetic construct
  source 1..20: mol_type = other RNA
gtaaagagaggtgcgccccg

SEQ ID NO: 3829 - RNA, 20 nt, synthetic construct
  source 1..20: mol_type = other RNA
gtaaactgagccaggagaaa

SEQ ID NO: 3830 - RNA, 20 nt, synthetic construct
  source 1..20: mol_type = other RNA
gtaaaccctgttccgactac

SEQ ID NO: 3831 - RNA, 21 nt, synthetic construct
  source 1..21: mol_type = other RNA
gtaaacaaaggacgtcccgcg

SEQ ID NO: 3832 - RNA, 20 nt, synthetic construct
  source 1..20: mol_type = other RNA
gtaaacaaaggacgtcccgc

SEQ ID NO: 3833 - RNA, 20 nt, synthetic construct
  source 1..20: mol_type = other RNA
ggttttatccaaaggttacc

SEQ ID NO: 3834 - RNA, 20 nt, synthetic construct
  source 1..20: mol_type = other RNA
ggtttggtacagcaacagga

SEQ ID NO: 3835 - RNA, 20 nt, synthetic construct
  source 1..20: mol_type = other RNA
ggtttcaccccaccgcacgg

SEQ ID NO: 3836 - RNA, 20 nt, synthetic construct
  source 1..20: mol_type = other RNA
ggtttactgctcctgaactg

SEQ ID NO: 3837 - RNA, 20 nt, synthetic construct
  source 1..20: mol_type = other RNA
ggtttaatacccttatccaa

SEQ ID NO: 3838 - RNA, 20 nt, synthetic construct
  source 1..20: mol_type = other RNA
ggttggggactgcgaatttt

SEQ ID NO: 3839 - RNA, 20 nt, synthetic construct
  source 1..20: mol_type = other RNA
ggttgcgtcagcaaacactt

SEQ ID NO: 3840 - RNA, 20 nt, synthetic construct
  source 1..20: mol_type = other RNA
ggttgaggatcctggaatta

SEQ ID NO: 3841 - RNA, 21 nt, synthetic construct
  source 1..21: mol_type = other RNA
ggttcggcatggtcccgtgct

SEQ ID NO: 3842 - RNA, 20 nt, synthetic construct
  source 1..20: mol_type = other RNA
ggttcggcatggtcccgtgc

SEQ ID NO: 3843 - RNA, 21 nt, synthetic construct
  source 1..21: mol_type = other RNA
ggttccttgagcagtagtcat

SEQ ID NO: 3844 - RNA, 20 nt, synthetic construct
  source 1..20: mol_type = other RNA
ggttccttgagcagtagtca

SEQ ID NO: 3845 - RNA, 20 nt, synthetic construct
  source 1..20: mol_type = other RNA
ggttccacgcacgcgctgat

SEQ ID NO: 3846 - RNA, 20 nt, synthetic construct
  source 1..20: mol_type = other RNA
ggttcaggtattgtttacac

SEQ ID NO: 3847 - RNA, 20 nt, synthetic construct
  source 1..20: mol_type = other RNA
ggttatgtcattggaagtta

SEQ ID NO: 3848 - RNA, 20 nt, synthetic construct
  source 1..20: mol_type = other RNA
ggttactctctgaattttat

SEQ ID NO: 3849 - RNA, 20 nt, synthetic construct
  source 1..20: mol_type = other RNA
ggttaccaaatatttaccat

SEQ ID NO: 3850 - RNA, 20 nt, synthetic construct
  source 1..20: mol_type = other RNA
ggtgttttccaatgaggatt

SEQ ID NO: 3851 - RNA, 20 nt, synthetic construct
  source 1..20: mol_type = other RNA
ggtgttaatttggaagatcc

SEQ ID NO: 3852 - RNA, 20 nt, synthetic construct
  source 1..20: mol_type = other RNA
ggtgtaaatgtatattagga

SEQ ID NO: 3853 - RNA, 20 nt, synthetic construct
  source 1..20: mol_type = other RNA
ggtggtctccatgcgacgtg

SEQ ID NO: 3854 - RNA, 21 nt, synthetic construct
  source 1..21: mol_type = other RNA
ggtggtcgggaaagaatccca

SEQ ID NO: 3855 - RNA, 20 nt, synthetic construct
  source 1..20: mol_type = other RNA
ggtggtcgggaaagaatccc

SEQ ID NO: 3856 - RNA, 20 nt, synthetic construct
  source 1..20: mol_type = other RNA
ggtggggtgaaacccagccc

SEQ ID NO: 3857 - RNA, 20 nt, synthetic construct
  source 1..20: mol_type = other RNA
ggtggagccctcaggctcag

SEQ ID NO: 3858 - RNA, 20 nt, synthetic construct
  source 1..20: mol_type = other RNA
ggtggaaagattctgcccca

SEQ ID NO: 3859 - RNA, 20 nt, synthetic construct
  source 1..20: mol_type = other RNA
ggtgcgccccgtggtcggtc

SEQ ID NO: 3860 - RNA, 21 nt, synthetic construct
  source 1..21: mol_type = other RNA
ggtgcaatttccgtccgaagg

SEQ ID NO: 3861 - RNA, 20 nt, synthetic construct
  source 1..20: mol_type = other RNA
ggtgagtgattggaggttgg

SEQ ID NO: 3862 - RNA, 20 nt, synthetic construct
  source 1..20: mol_type = other RNA
ggtgaggtgaacaatgctca

SEQ ID NO: 3863 - RNA, 20 nt, synthetic construct
  source 1..20: mol_type = other RNA
ggtctgtgccaagtgtttgc

SEQ ID NO: 3864 - RNA, 20 nt, synthetic construct
  source 1..20: mol_type = other RNA
ggtctggagcaaacattatc

SEQ ID NO: 3865 - RNA, 21 nt, synthetic construct
  source 1..21: mol_type = other RNA
ggtctctagatgctggatctt

SEQ ID NO: 3866 - RNA, 20 nt, synthetic construct
  source 1..20: mol_type = other RNA
ggtcggtcgttgacattgca

SEQ ID NO: 3867 - RNA, 20 nt, synthetic construct
  source 1..20: mol_type = other RNA
ggtcggtcggaacggcagac

SEQ ID NO: 3868 - RNA, 20 nt, synthetic construct
  source 1..20: mol_type = other RNA
ggtcgggaaagaatcccaga

SEQ ID NO: 3869 - RNA, 20 nt, synthetic construct
  source 1..20: mol_type = other RNA
ggtcggaacggcagacggag

SEQ ID NO: 3870 - RNA, 20 nt, synthetic construct
  source 1..20: mol_type = other RNA
ggtcgatgtccatgccccaa

SEQ ID NO: 3871 - RNA, 20 nt, synthetic construct
  source 1..20: mol_type = other RNA
ggtcccgtgctggtggttga

SEQ ID NO: 3872 - RNA, 20 nt, synthetic construct
  source 1..20: mol_type = other RNA
ggtcatgggccatcagcgcg

SEQ ID NO: 3873 - RNA, 20 nt, synthetic construct
  source 1..20: mol_type = other RNA
ggtcaccatattcttgggaa

SEQ ID NO: 3874 - RNA, 20 nt, synthetic construct
  source 1..20: mol_type = other RNA
ggtattgtgaggattcttgt

SEQ ID NO: 3875 - RNA, 20 nt, synthetic construct
  source 1..20: mol_type = other RNA
ggtattaaaccttattatcc

SEQ ID NO: 3876 - RNA, 20 nt, synthetic construct
  source 1..20: mol_type = other RNA
ggtatacatttaaaccctaa

SEQ ID NO: 3877 - RNA, 20 nt, synthetic construct
  source 1..20: mol_type = other RNA
ggtagttccccctagaaaat

SEQ ID NO: 3878 - RNA, 20 nt, synthetic construct
  source 1..20: mol_type = other RNA
ggtaggctgccttcctgtct

SEQ ID NO: 3879 - RNA, 20 nt, synthetic construct
  source 1..20: mol_type = other RNA
ggtaggagctggagcattcg

SEQ ID NO: 3880 - RNA, 20 nt, synthetic construct
  source 1..20: mol_type = other RNA
ggtaacctttggataaaacc

SEQ ID NO: 3881 - RNA, 20 nt, synthetic construct
  source 1..20: mol_type = other RNA
ggtaaatatttggtaacctt

SEQ ID NO: 3882 - RNA, 20 nt, synthetic construct
  source 1..20: mol_type = other RNA
gggtttcaccccaccgcacg

SEQ ID NO: 3883 - RNA, 20 nt, synthetic construct
  source 1..20: mol_type = other RNA
gggtttactgctcctgaact

SEQ ID NO: 3884 - RNA, 20 nt, synthetic construct
  source 1..20: mol_type = other RNA
gggtttaaatgtatacccaa

SEQ ID NO: 3885 - RNA, 20 nt, synthetic construct
  source 1..20: mol_type = other RNA
gggttgcgtcagcaaacact

SEQ ID NO: 3886 - RNA, 20 nt, synthetic construct
  source 1..20: mol_type = other RNA
gggttactctctgaatttta

SEQ ID NO: 3887 - RNA, 20 nt, synthetic construct
  source 1..20: mol_type = other RNA
gggtgttaatttggaagatc

SEQ ID NO: 3888 - RNA, 20 nt, synthetic construct
  source 1..20: mol_type = other RNA
gggtggagccctcaggctca

SEQ ID NO: 3889 - RNA, 20 nt, synthetic construct
  source 1..20: mol_type = other RNA
gggtcgtccgcaggattcag

SEQ ID NO: 3890 - RNA, 20 nt, synthetic construct
  source 1..20: mol_type = other RNA
gggtcgatgtccatgcccca

SEQ ID NO: 3891 - RNA, 20 nt, synthetic construct
  source 1..20: mol_type = other RNA
gggtcctaggaatcctgatg

SEQ ID NO: 3892 - RNA, 21 nt, synthetic construct
  source 1..21: mol_type = other RNA
gggtcaccatattcttgggaa

SEQ ID NO: 3893 - RNA, 20 nt, synthetic construct
  source 1..20: mol_type = other RNA
gggtattaaaccttattatc

SEQ ID NO: 3894 - RNA, 20 nt, synthetic construct
  source 1..20: mol_type = other RNA
gggtatattatataagagag

SEQ ID NO: 3895 - RNA, 21 nt, synthetic construct
  source 1..21: mol_type = other RNA
gggtaggctgccttcctgtct

SEQ ID NO: 3896 - RNA, 20 nt, synthetic construct
  source 1..20: mol_type = other RNA
gggtaggctgccttcctgtc

SEQ ID NO: 3897 - RNA, 20 nt, synthetic construct
  source 1..20: mol_type = other RNA
ggggtttttcttgttgacaa

SEQ ID NO: 3898 - RNA, 20 nt, synthetic construct
  source 1..20: mol_type = other RNA
ggggtggagccctcaggctc

SEQ ID NO: 3899 - RNA, 20 nt, synthetic construct
  source 1..20: mol_type = other RNA
ggggtgaaacccagcccgaa

SEQ ID NO: 3900 - RNA, 20 nt, synthetic construct
  source 1..20: mol_type = other RNA
gggggaggagattagattaa

SEQ ID NO: 3901 - RNA, 20 nt, synthetic construct
  source 1..20: mol_type = other RNA
gggggaactaccgtgtgtct

SEQ ID NO: 3902 - RNA, 20 nt, synthetic construct
  source 1..20: mol_type = other RNA
ggggcttggtcatgggccat

SEQ ID NO: 3903 - RNA, 20 nt, synthetic construct
  source 1..20: mol_type = other RNA
ggggcgcacctctctttacg

SEQ ID NO: 3904 - RNA, 20 nt, synthetic construct
  source 1..20: mol_type = other RNA
ggggcatttggtggtctata

SEQ ID NO: 3905 - RNA, 20 nt, synthetic construct
  source 1..20: mol_type = other RNA
ggggactgcgaattttggcc

SEQ ID NO: 3906 - RNA, 20 nt, synthetic construct
  source 1..20: mol_type = other RNA
ggggacgagagagtcccaag

SEQ ID NO: 3907 - RNA, 20 nt, synthetic construct
  source 1..20: mol_type = other RNA
ggggaccctgcgctgaacat

SEQ ID NO: 3908 - RNA, 20 nt, synthetic construct
  source 1..20: mol_type = other RNA
ggggaactaccgtgtgtctt

SEQ ID NO: 3909 - RNA, 21 nt, synthetic construct
  source 1..21: mol_type = other RNA
gggctttcggaaaattcctat

SEQ ID NO: 3910 - RNA, 20 nt, synthetic construct
  source 1..20: mol_type = other RNA
gggctttcggaaaattccta

SEQ ID NO: 3911 - RNA, 20 nt, synthetic construct
  source 1..20: mol_type = other RNA
gggcttggtcatgggccatc

SEQ ID NO: 3912 - RNA, 20 nt, synthetic construct
  source 1..20: mol_type = other RNA
gggctgaggcccactcccat

SEQ ID NO: 3913 - RNA, 20 nt, synthetic construct
  source 1..20: mol_type = other RNA
gggcgcacctctctttacgc

SEQ ID NO: 3914 - RNA, 20 nt, synthetic construct
  source 1..20: mol_type = other RNA
gggcctcagcccgtttctcc

SEQ ID NO: 3915 - RNA, 20 nt, synthetic construct
  source 1..20: mol_type = other RNA
gggccatcagcgcgtgcgtg

SEQ ID NO: 3916 - RNA, 21 nt, synthetic construct
  source 1..21: mol_type = other RNA
gggccaagtctgtacagcatc

SEQ ID NO: 3917 - RNA, 20 nt, synthetic construct
  source 1..20: mol_type = other RNA
gggcatactacaaactttgc

SEQ ID NO: 3918 - RNA, 20 nt, synthetic construct
  source 1..20: mol_type = other RNA
gggcagaatctttccaccag

SEQ ID NO: 3919 - RNA, 20 nt, synthetic construct
  source 1..20: mol_type = other RNA
gggcaacggggtaaaggttc

SEQ ID NO: 3920 - RNA, 21 nt, synthetic construct
  source 1..21: mol_type = other RNA
gggcaacattcggtgggcgtt

SEQ ID NO: 3921 - RNA, 21 nt, synthetic construct
  source 1..21: mol_type = other RNA
gggatcttgcagagtttggtg

SEQ ID NO: 3922 - RNA, 20 nt, synthetic construct
  source 1..20: mol_type = other RNA
gggatcttgcagagtttggt

SEQ ID NO: 3923 - RNA, 21 nt, synthetic construct
  source 1..21: mol_type = other RNA
gggatacatagaggttccttg

SEQ ID NO: 3924 - RNA, 20 nt, synthetic construct
  source 1..20: mol_type = other RNA
gggatacatagaggttcctt

SEQ ID NO: 3925 - RNA, 21 nt, synthetic construct
  source 1..21: mol_type = other RNA
gggaggagttgggggaggaga

SEQ ID NO: 3926 - RNA, 20 nt, synthetic construct
  source 1..20: mol_type = other RNA
gggagaggcagtagtcggaa

SEQ ID NO: 3927 - RNA, 20 nt, synthetic construct
  source 1..20: mol_type = other RNA
gggactgcgaattttggcca

SEQ ID NO: 3928 - RNA, 20 nt, synthetic construct
  source 1..20: mol_type = other RNA
gggaccctgcgctgaacatg

SEQ ID NO: 3929 - RNA, 20 nt, synthetic construct
  source 1..20: mol_type = other RNA
gggaccatgccgaacctgca

SEQ ID NO: 3930 - RNA, 20 nt, synthetic construct
  source 1..20: mol_type = other RNA
gggaagccttagagtctcct

SEQ ID NO: 3931 - RNA, 20 nt, synthetic construct
  source 1..20: mol_type = other RNA
gggaaagccctacgaaccac

SEQ ID NO: 3932 - RNA, 21 nt, synthetic construct
  source 1..21: mol_type = other RNA
gggaaagaatcccagaggatt

SEQ ID NO: 3933 - RNA, 20 nt, synthetic construct
  source 1..20: mol_type = other RNA
gggaaagaatcccagaggat

SEQ ID NO: 3934 - RNA, 20 nt, synthetic construct
  source 1..20: mol_type = other RNA
ggctttcggaaaattcctat

SEQ ID NO: 3935 - RNA, 21 nt, synthetic construct
  source 1..21: mol_type = other RNA
ggctttcagttatatggatga

SEQ ID NO: 3936 - RNA, 21 nt, synthetic construct
  source 1..21: mol_type = other RNA
ggcttcccgatacagagctga

SEQ ID NO: 3937 - RNA, 20 nt, synthetic construct
  source 1..20: mol_type = other RNA
ggcttcccgatacagagctg

SEQ ID NO: 3938 - RNA, 20 nt, synthetic construct
  source 1..20: mol_type = other RNA
ggctggatccaactggtggt

SEQ ID NO: 3939 - RNA, 20 nt, synthetic construct
  source 1..20: mol_type = other RNA
ggctgaggcccactcccata

SEQ ID NO: 3940 - RNA, 20 nt, synthetic construct
  source 1..20: mol_type = other RNA
ggctccagttcaggagcagt

SEQ ID NO: 3941 - RNA, 20 nt, synthetic construct
  source 1..20: mol_type = other RNA
ggctaggagttccgcagtat

SEQ ID NO: 3942 - RNA, 20 nt, synthetic construct
  source 1..20: mol_type = other RNA
ggcgttcacggtggtctcca

SEQ ID NO: 3943 - RNA, 20 nt, synthetic construct
  source 1..20: mol_type = other RNA
ggcgggtatattatataaga

SEQ ID NO: 3944 - RNA, 21 nt, synthetic construct
  source 1..21: mol_type = other RNA
ggcggggtttttcttgttgac

SEQ ID NO: 3945 - RNA, 20 nt, synthetic construct
  source 1..20: mol_type = other RNA
ggcggggtttttcttgttga

SEQ ID NO: 3946 - RNA, 21 nt, synthetic construct
  source 1..21: mol_type = other RNA
ggcggatttgctggcaaagtt

SEQ ID NO: 3947 - RNA, 21 nt, synthetic construct
  source 1..21: mol_type = other RNA
ggcgattggtggaggcaggag

SEQ ID NO: 3948 - RNA, 20 nt, synthetic construct
  source 1..20: mol_type = other RNA
ggcgattggtggaggcagga

SEQ ID NO: 3949 - RNA, 20 nt, synthetic construct
  source 1..20: mol_type = other RNA
ggcgagggagttcttcttct

SEQ ID NO: 3950 - RNA, 21 nt, synthetic construct
  source 1..21: mol_type = other RNA
ggcgagaaagtgaaagcctgc

SEQ ID NO: 3951 - RNA, 20 nt, synthetic construct
  source 1..20: mol_type = other RNA
ggccttgtaagttggcgaga

SEQ ID NO: 3952 - RNA, 20 nt, synthetic construct
  source 1..20: mol_type = other RNA
ggcctgtatttccctgctgg

SEQ ID NO: 3953 - RNA, 20 nt, synthetic construct
  source 1..20: mol_type = other RNA
ggcctctcactctgggatct

SEQ ID NO: 3954 - RNA, 20 nt, synthetic construct
  source 1..20: mol_type = other RNA
ggcctccgtgcggtggggtg

SEQ ID NO: 3955 - RNA, 20 nt, synthetic construct
  source 1..20: mol_type = other RNA
ggcctcagcccgtttctcct

SEQ ID NO: 3956 - RNA, 20 nt, synthetic construct
  source 1..20: mol_type = other RNA
ggcccatattagtgttgaca

SEQ ID NO: 3957 - RNA, 20 nt, synthetic construct
  source 1..20: mol_type = other RNA
ggcccacttacagttaatga

SEQ ID NO: 3958 - RNA, 20 nt, synthetic construct
  source 1..20: mol_type = other RNA
ggccagacgccaacaaggta

SEQ ID NO: 3959 - RNA, 20 nt, synthetic construct
  source 1..20: mol_type = other RNA
ggcatggacatcgaccctta

SEQ ID NO: 3960 - RNA, 20 nt, synthetic construct
  source 1..20: mol_type = other RNA
ggcatagcagcaggatgaag

SEQ ID NO: 3961 - RNA, 21 nt, synthetic construct
  source 1..21: mol_type = other RNA
ggcatactacaaactttgcca

SEQ ID NO: 3962 - RNA, 20 nt, synthetic construct
  source 1..20: mol_type = other RNA
ggcatactacaaactttgcc

SEQ ID NO: 3963 - RNA, 21 nt, synthetic construct
  source 1..21: mol_type = other RNA
ggcaggaggcggatttgctgg

SEQ ID NO: 3964 - RNA, 21 nt, synthetic construct
  source 1..21: mol_type = other RNA
ggcagcaaaacccaaaagacc

SEQ ID NO: 3965 - RNA, 20 nt, synthetic construct
  source 1..20: mol_type = other RNA
ggcagatgagaaggcacaga

SEQ ID NO: 3966 - RNA, 21 nt, synthetic construct
  source 1..21: mol_type = other RNA
ggcagacggagaaggggacga

SEQ ID NO: 3967 - RNA, 20 nt, synthetic construct
  source 1..20: mol_type = other RNA
ggcagacggagaaggggacg

SEQ ID NO: 3968 - RNA, 20 nt, synthetic construct
  source 1..20: mol_type = other RNA
ggcactagtaaactgagcca

SEQ ID NO: 3969 - RNA, 20 nt, synthetic construct
  source 1..20: mol_type = other RNA
ggcacagacctggccgttgc

SEQ ID NO: 3970 - RNA, 20 nt, synthetic construct
  source 1..20: mol_type = other RNA
ggcaacggccaggtctgtgc

SEQ ID NO: 3971 - RNA, 20 nt, synthetic construct
  source 1..20: mol_type = other RNA
ggcaacataccttgatagtc

SEQ ID NO: 3972 - RNA, 20 nt, synthetic construct
  source 1..20: mol_type = other RNA
ggatttgctgtgtttgctct

SEQ ID NO: 3973 - RNA, 20 nt, synthetic construct
  source 1..20: mol_type = other RNA
ggatttgctggcaaagtttg

SEQ ID NO: 3974 - RNA, 21 nt, synthetic construct
  source 1..21: mol_type = other RNA
ggattctttcccgaccaccag

SEQ ID NO: 3975 - RNA, 20 nt, synthetic construct
  source 1..20: mol_type = other RNA
ggattaaagacaggtacagt

SEQ ID NO: 3976 - RNA, 20 nt, synthetic construct
  source 1..20: mol_type = other RNA
ggatgatgggatgggaatac

SEQ ID NO: 3977 - RNA, 20 nt, synthetic construct
  source 1..20: mol_type = other RNA
ggatgagtgtttctcaaagg

SEQ ID NO: 3978 - RNA, 20 nt, synthetic construct
  source 1..20: mol_type = other RNA
ggatgaagaggaagatgata

SEQ ID NO: 3979 - RNA, 20 nt, synthetic construct
  source 1..20: mol_type = other RNA
ggatcttgcagagtttggtg

SEQ ID NO: 3980 - RNA, 20 nt, synthetic construct
  source 1..20: mol_type = other RNA
ggatcggcagaggagccgaa

SEQ ID NO: 3981 - RNA, 20 nt, synthetic construct
  source 1..20: mol_type = other RNA
ggatcctggaattagaggac

SEQ ID NO: 3982 - RNA, 20 nt, synthetic construct
  source 1..20: mol_type = other RNA
ggatcctcaaccaccagcac

SEQ ID NO: 3983 - RNA, 21 nt, synthetic construct
  source 1..21: mol_type = other RNA
ggatccaactggtggtcggga

SEQ ID NO: 3984 - RNA, 20 nt, synthetic construct
  source 1..20: mol_type = other RNA
ggatccaactggtggtcggg

SEQ ID NO: 3985 - RNA, 20 nt, synthetic construct
  source 1..20: mol_type = other RNA
ggatacgatgtatatttgcg

SEQ ID NO: 3986 - RNA, 20 nt, synthetic construct
  source 1..20: mol_type = other RNA
ggatacatagaggttccttg

SEQ ID NO: 3987 - RNA, 20 nt, synthetic construct
  source 1..20: mol_type = other RNA
ggataaccacattgtgtaaa

SEQ ID NO: 3988 - RNA, 21 nt, synthetic construct
  source 1..21: mol_type = other RNA
ggataaaacctagcaggcata

SEQ ID NO: 3989 - RNA, 20 nt, synthetic construct
  source 1..20: mol_type = other RNA
ggagttccgcagtatggatc

SEQ ID NO: 3990 - RNA, 20 nt, synthetic construct
  source 1..20: mol_type = other RNA
ggagtgcgaatccacactcc

SEQ ID NO: 3991 - RNA, 20 nt, synthetic construct
  source 1..20: mol_type = other RNA
ggagtccgcgtaaagagagg

SEQ ID NO: 3992 - RNA, 20 nt, synthetic construct
  source 1..20: mol_type = other RNA
ggaggttggtgagtgattgg

SEQ ID NO: 3993 - RNA, 20 nt, synthetic construct
  source 1..20: mol_type = other RNA
ggagctggagcattcgggct

SEQ ID NO: 3994 - RNA, 20 nt, synthetic construct
  source 1..20: mol_type = other RNA
ggagcaaacattatcgggac

SEQ ID NO: 3995 - RNA, 20 nt, synthetic construct
  source 1..20: mol_type = other RNA
ggagaggcagtagtcggaac

SEQ ID NO: 3996 - RNA, 20 nt, synthetic construct
  source 1..20: mol_type = other RNA
ggagaggacaacagagttat

SEQ ID NO: 3997 - RNA, 21 nt, synthetic construct
  source 1..21: mol_type = other RNA
ggagaccaccgtgaacgccca

SEQ ID NO: 3998 - RNA, 21 nt, synthetic construct
  source 1..21: mol_type = other RNA
ggacctgcctcgtcgtctaac

SEQ ID NO: 3999 - RNA, 20 nt, synthetic construct
  source 1..20: mol_type = other RNA
ggacctgcctcgtcgtctaa

SEQ ID NO: 4000 - RNA, 20 nt, synthetic construct
  source 1..20: mol_type = other RNA
ggaccctgcgctgaacatgg

SEQ ID NO: 4001 - RNA, 20 nt, synthetic construct
  source 1..20: mol_type = other RNA
ggaccccttctcgtgttaca

SEQ ID NO: 4002 - RNA, 20 nt, synthetic construct
  source 1..20: mol_type = other RNA
ggacatgaacaagagatgat

SEQ ID NO: 4003 - RNA, 21 nt, synthetic construct
  source 1..21: mol_type = other RNA
ggacacctggccagacgccaa

SEQ ID NO: 4004 - RNA, 21 nt, synthetic construct
  source 1..21: mol_type = other RNA
ggacaagttggaggacaggag

SEQ ID NO: 4005 - RNA, 20 nt, synthetic construct
  source 1..20: mol_type = other RNA
ggaattagaggacaaacggg

SEQ ID NO: 4006 - RNA, 20 nt, synthetic construct
  source 1..20: mol_type = other RNA
ggaagtgttgataggatagg

SEQ ID NO: 4007 - RNA, 20 nt, synthetic construct
  source 1..20: mol_type = other RNA
ggaaggcgggtatattatat

SEQ ID NO: 4008 - RNA, 20 nt, synthetic construct
  source 1..20: mol_type = other RNA
ggaagccttagagtctcctg

SEQ ID NO: 4009 - RNA, 20 nt, synthetic construct
  source 1..20: mol_type = other RNA
ggaagatgataaaacgccgc

SEQ ID NO: 4010 - RNA, 21 nt, synthetic construct
  source 1..21: mol_type = other RNA
ggaagatccagcatctagaga

SEQ ID NO: 4011 - RNA, 21 nt, synthetic construct
  source 1..21: mol_type = other RNA
ggaactaccgtgtgtcttggc

SEQ ID NO: 4012 - RNA, 21 nt, synthetic construct
  source 1..21: mol_type = other RNA
ggaactaatgactctagctac

SEQ ID NO: 4013 - RNA, 20 nt, synthetic construct
  source 1..20: mol_type = other RNA
ggaacggcagacggagaagg

SEQ ID NO: 4014 - RNA, 20 nt, synthetic construct
  source 1..20: mol_type = other RNA
ggaacagggtttactgctcc

SEQ ID NO: 4015 - RNA, 21 nt, synthetic construct
  source 1..21: mol_type = other RNA
ggaaatacaggcctctcactc

SEQ ID NO: 4016 - RNA, 20 nt, synthetic construct
  source 1..20: mol_type = other RNA
ggaaagccctacgaaccact

SEQ ID NO: 4017 - RNA, 21 nt, synthetic construct
  source 1..21: mol_type = other RNA
ggaaagattctgccccatgct

SEQ ID NO: 4018 - RNA, 20 nt, synthetic construct
  source 1..20: mol_type = other RNA
ggaaagaagtcagaaggcaa

SEQ ID NO: 4019 - RNA, 20 nt, synthetic construct
  source 1..20: mol_type = other RNA
ggaaaattcctatgggagtg

SEQ ID NO: 4020 - RNA, 20 nt, synthetic construct
  source 1..20: mol_type = other RNA
gctttcggaaaattcctatg

SEQ ID NO: 4021 - RNA, 21 nt, synthetic construct
  source 1..21: mol_type = other RNA
gctttcccccactgtttggct

SEQ ID NO: 4022 - RNA, 20 nt, synthetic construct
  source 1..20: mol_type = other RNA
gcttggtcatgggccatcag

SEQ ID NO: 4023 - RNA, 20 nt, synthetic construct
  source 1..20: mol_type = other RNA
gcttggaggcttgaacagta

SEQ ID NO: 4024 - RNA, 21 nt, synthetic construct
  source 1..21: mol_type = other RNA
gcttgcctgagtgcagtatgg

SEQ ID NO: 4025 - RNA, 20 nt, synthetic construct
  source 1..20: mol_type = other RNA
gcttcccgatacagagctga

SEQ ID NO: 4026 - RNA, 20 nt, synthetic construct
  source 1..20: mol_type = other RNA
gctgtgtttgctctgaaggc

SEQ ID NO: 4027 - RNA, 20 nt, synthetic construct
  source 1..20: mol_type = other RNA
gctgtgccttgggtggcttt

SEQ ID NO: 4028 - RNA, 20 nt, synthetic construct
  source 1..20: mol_type = other RNA
gctgtaggcataaattggtc

SEQ ID NO: 4029 - RNA, 20 nt, synthetic construct
  source 1..20: mol_type = other RNA
gctgtagatcttgttcccaa

SEQ ID NO: 4030 - RNA, 20 nt, synthetic construct
  source 1..20: mol_type = other RNA
gctggtggttgaggatcctg

SEQ ID NO: 4031 - RNA, 20 nt, synthetic construct
  source 1..20: mol_type = other RNA
gctggtggctccagttcagg

SEQ ID NO: 4032 - RNA, 20 nt, synthetic construct
  source 1..20: mol_type = other RNA
gctggatccaactggtggtc

SEQ ID NO: 4033 - RNA, 21 nt, synthetic construct
  source 1..21: mol_type = other RNA
gctgctaggctgtgctgccaa

SEQ ID NO: 4034 - RNA, 20 nt, synthetic construct
  source 1..20: mol_type = other RNA
gctgcgagcaaaacaagcgg

SEQ ID NO: 4035 - RNA, 20 nt, synthetic construct
  source 1..20: mol_type = other RNA
gctgccccatttacacaatg

SEQ ID NO: 4036 - RNA, 20 nt, synthetic construct
  source 1..20: mol_type = other RNA
gctgaggcccactcccatag

SEQ ID NO: 4037 - RNA, 20 nt, synthetic construct
  source 1..20: mol_type = other RNA
gctctgtatcgggaagcctt

SEQ ID NO: 4038 - RNA, 20 nt, synthetic construct
  source 1..20: mol_type = other RNA
gctcgcagcaggtctggagc

SEQ ID NO: 4039 - RNA, 20 nt, synthetic construct
  source 1..20: mol_type = other RNA
gctcctgaactggagccacc

SEQ ID NO: 4040 - RNA, 20 nt, synthetic construct
  source 1..20: mol_type = other RNA
gctcctctgccgatccatac

SEQ ID NO: 4041 - RNA, 20 nt, synthetic construct
  source 1..20: mol_type = other RNA
gctcctaccttgttggcgtc

SEQ ID NO: 4042 - RNA, 20 nt, synthetic construct
  source 1..20: mol_type = other RNA
gctccagctcctaccttgtt

SEQ ID NO: 4043 - RNA, 20 nt, synthetic construct
  source 1..20: mol_type = other RNA
gctccagacctgctgcgagc

SEQ ID NO: 4044 - RNA, 21 nt, synthetic construct
  source 1..21: mol_type = other RNA
gctcaggagactctaaggctt

SEQ ID NO: 4045 - RNA, 20 nt, synthetic construct
  source 1..20: mol_type = other RNA
gctatgcctcatcttcttgt

SEQ ID NO: 4046 - RNA, 20 nt, synthetic construct
  source 1..20: mol_type = other RNA
gctaggctgtgctgccaact

SEQ ID NO: 4047 - RNA, 20 nt, synthetic construct
  source 1..20: mol_type = other RNA
gcgtcagcaaacacttggca

SEQ ID NO: 4048 - RNA, 20 nt, synthetic construct
  source 1..20: mol_type = other RNA
gcgggtatattatataagag

SEQ ID NO: 4049 - RNA, 20 nt, synthetic construct
  source 1..20: mol_type = other RNA
gcggggtttttcttgttgac

SEQ ID NO: 4050 - RNA, 21 nt, synthetic construct
  source 1..21: mol_type = other RNA
gcgggagaggacaacagagtt

SEQ ID NO: 4051 - RNA, 20 nt, synthetic construct
  source 1..20: mol_type = other RNA
gcgctgatggcccatgacca

SEQ ID NO: 4052 - RNA, 20 nt, synthetic construct
  source 1..20: mol_type = other RNA
gcgcgtgcgtggaacctttt

SEQ ID NO: 4053 - RNA, 20 nt, synthetic construct
  source 1..20: mol_type = other RNA
gcgccgacgggacgtaaaca

SEQ ID NO: 4054 - RNA, 20 nt, synthetic construct
  source 1..20: mol_type = other RNA
gcgcagggtccccaatcctc

SEQ ID NO: 4055 - RNA, 20 nt, synthetic construct
  source 1..20: mol_type = other RNA
gcgattgagaccttcgtctg

SEQ ID NO: 4056 - RNA, 20 nt, synthetic construct
  source 1..20: mol_type = other RNA
gcgataaccaggacaagttg

SEQ ID NO: 4057 - RNA, 20 nt, synthetic construct
  source 1..20: mol_type = other RNA
gcgagggagttcttcttcta

SEQ ID NO: 4058 - RNA, 20 nt, synthetic construct
  source 1..20: mol_type = other RNA
gcgagcaaaacaagcggcta

SEQ ID NO: 4059 - RNA, 20 nt, synthetic construct
  source 1..20: mol_type = other RNA
gcgacgtgcagaggtgaagc

SEQ ID NO: 4060 - RNA, 20 nt, synthetic construct
  source 1..20: mol_type = other RNA
gcgaatccacactccgaaag

SEQ ID NO: 4061 - RNA, 20 nt, synthetic construct
  source 1..20: mol_type = other RNA
gcgaagtgcacacggtccgg

SEQ ID NO: 4062 - RNA, 20 nt, synthetic construct
  source 1..20: mol_type = other RNA
gccttttggggtggagccct

SEQ ID NO: 4063 - RNA, 20 nt, synthetic construct
  source 1..20: mol_type = other RNA
gccttctgacttctttcctt

SEQ ID NO: 4064 - RNA, 20 nt, synthetic construct
  source 1..20: mol_type = other RNA
gccttcagagcaaacacagc

SEQ ID NO: 4065 - RNA, 20 nt, synthetic construct
  source 1..20: mol_type = other RNA
gcctgtatttccctgctggt

SEQ ID NO: 4066 - RNA, 20 nt, synthetic construct
  source 1..20: mol_type = other RNA
gcctgcttagattgaataca

SEQ ID NO: 4067 - RNA, 20 nt, synthetic construct
  source 1..20: mol_type = other RNA
gcctgctaggttttatccaa

SEQ ID NO: 4068 - RNA, 20 nt, synthetic construct
  source 1..20: mol_type = other RNA
gcctgagggctccaccccaa

SEQ ID NO: 4069 - RNA, 21 nt, synthetic construct
  source 1..21: mol_type = other RNA
gcctgaggatgagtgtttctc

SEQ ID NO: 4070 - RNA, 20 nt, synthetic construct
  source 1..20: mol_type = other RNA
gcctgaggatgagtgtttct

SEQ ID NO: 4071 - RNA, 21 nt, synthetic construct
  source 1..21: mol_type = other RNA
gcctctcactctgggatcttg

SEQ ID NO: 4072 - RNA, 20 nt, synthetic construct
  source 1..20: mol_type = other RNA
gcctcgtcgtctaacaacag

SEQ ID NO: 4073 - RNA, 20 nt, synthetic construct
  source 1..20: mol_type = other RNA
gcctccaccaatcgccagac

SEQ ID NO: 4074 - RNA, 20 nt, synthetic construct
  source 1..20: mol_type = other RNA
gcctcagctctgtatcggga

SEQ ID NO: 4075 - RNA, 21 nt, synthetic construct
  source 1..21: mol_type = other RNA
gcctcagcccgtttctcctgg

SEQ ID NO: 4076 - RNA, 20 nt, synthetic construct
  source 1..20: mol_type = other RNA
gcctacagcctcctagtaca

SEQ ID NO: 4077 - RNA, 21 nt, synthetic construct
  source 1..21: mol_type = other RNA
gcctacaaactgttcacattt

SEQ ID NO: 4078 - RNA, 21 nt, synthetic construct
  source 1..21: mol_type = other RNA
gcctaaagttcaggcaactct

SEQ ID NO: 4079 - RNA, 21 nt, synthetic construct
  source 1..21: mol_type = other RNA
gccgttgccgggcaacggggt

SEQ ID NO: 4080 - RNA, 20 nt, synthetic construct
  source 1..20: mol_type = other RNA
gccgttgccgggcaacgggg

SEQ ID NO: 4081 - RNA, 20 nt, synthetic construct
  source 1..20: mol_type = other RNA
gccgttccgaccgaccacgg

SEQ ID NO: 4082 - RNA, 21 nt, synthetic construct
  source 1..21: mol_type = other RNA
gccgggcaacggggtaaaggt

SEQ ID NO: 4083 - RNA, 20 nt, synthetic construct
  source 1..20: mol_type = other RNA
gccgcttgttttgctcgcag

SEQ ID NO: 4084 - RNA, 20 nt, synthetic construct
  source 1..20: mol_type = other RNA
gccgcagacacatccagcga

SEQ ID NO: 4085 - RNA, 20 nt, synthetic construct
  source 1..20: mol_type = other RNA
gccgacgggacgtaaacaaa

SEQ ID NO: 4086 - RNA, 20 nt, synthetic construct
  source 1..20: mol_type = other RNA
gcccgtttgtcctctaattc

SEQ ID NO: 4087 - RNA, 20 nt, synthetic construct
  source 1..20: mol_type = other RNA
gccccgtggtcggtcggaac

SEQ ID NO: 4088 - RNA, 20 nt, synthetic construct
  source 1..20: mol_type = other RNA
gcccatgaccaagccccagc

SEQ ID NO: 4089 - RNA, 20 nt, synthetic construct
  source 1..20: mol_type = other RNA
gcccacttacagttaatgag

SEQ ID NO: 4090 - RNA, 20 nt, synthetic construct
  source 1..20: mol_type = other RNA
gcccaaggtcttacataaga

SEQ ID NO: 4091 - RNA, 20 nt, synthetic construct
  source 1..20: mol_type = other RNA
gccatttgttcagtggttcg

SEQ ID NO: 4092 - RNA, 20 nt, synthetic construct
  source 1..20: mol_type = other RNA
gccagtgggggttgcgtcag

SEQ ID NO: 4093 - RNA, 21 nt, synthetic construct
  source 1..21: mol_type = other RNA
gccaggtgtccttgttgggat

SEQ ID NO: 4094 - RNA, 20 nt, synthetic construct
  source 1..20: mol_type = other RNA
gccagacgccaacaaggtag

SEQ ID NO: 4095 - RNA, 20 nt, synthetic construct
  source 1..20: mol_type = other RNA
gccacccaaggcacagcttg

SEQ ID NO: 4096 - RNA, 20 nt, synthetic construct
  source 1..20: mol_type = other RNA
gccaccagcagggaaataca

SEQ ID NO: 4097 - RNA, 20 nt, synthetic construct
  source 1..20: mol_type = other RNA
gccacaagaacacatcatac

SEQ ID NO: 4098 - RNA, 20 nt, synthetic construct
  source 1..20: mol_type = other RNA
gccaagtctgtacagcatct

SEQ ID NO: 4099 - RNA, 20 nt, synthetic construct
  source 1..20: mol_type = other RNA
gccaacaaggtaggagctgg

SEQ ID NO: 4100 - RNA, 20 nt, synthetic construct
  source 1..20: mol_type = other RNA
gcatttggtggtctataagc

SEQ ID NO: 4101 - RNA, 20 nt, synthetic construct
  source 1..20: mol_type = other RNA
gcatgtattcaatctaagca

SEQ ID NO: 4102 - RNA, 21 nt, synthetic construct
  source 1..21: mol_type = other RNA
gcatggacatcgacccttata

SEQ ID NO: 4103 - RNA, 20 nt, synthetic construct
  source 1..20: mol_type = other RNA
gcatggacatcgacccttat

SEQ ID NO: 4104 - RNA, 20 nt, synthetic construct
  source 1..20: mol_type = other RNA
gcatctagagacctagtagt

SEQ ID NO: 4105 - RNA, 21 nt, synthetic construct
  source 1..21: mol_type = other RNA
gcatagcagcaggatgaagag

SEQ ID NO: 4106 - RNA, 20 nt, synthetic construct
  source 1..20: mol_type = other RNA
gcatagcagcaggatgaaga

SEQ ID NO: 4107 - RNA, 20 nt, synthetic construct
  source 1..20: mol_type = other RNA
gcatacaagggcattaacgc

SEQ ID NO: 4108 - RNA, 20 nt, synthetic construct
  source 1..20: mol_type = other RNA
gcataaattggtctgcgcac

SEQ ID NO: 4109 - RNA, 20 nt, synthetic construct
  source 1..20: mol_type = other RNA
gcagtatggatcggcagagg

SEQ ID NO: 4110 - RNA, 21 nt, synthetic construct
  source 1..21: mol_type = other RNA
gcagtagtcatgcaggttcgg

SEQ ID NO: 4111 - RNA, 21 nt, synthetic construct
  source 1..21: mol_type = other RNA
gcaggttcggcatggtcccgt

SEQ ID NO: 4112 - RNA, 20 nt, synthetic construct
  source 1..20: mol_type = other RNA
gcaggttcggcatggtcccg

SEQ ID NO: 4113 - RNA, 20 nt, synthetic construct
  source 1..20: mol_type = other RNA
gcagggtccccaatcctcga

SEQ ID NO: 4114 - RNA, 20 nt, synthetic construct
  source 1..20: mol_type = other RNA
gcaggctttcactttctcgc

SEQ ID NO: 4115 - RNA, 20 nt, synthetic construct
  source 1..20: mol_type = other RNA
gcaggatccagttggcagca

SEQ ID NO: 4116 - RNA, 20 nt, synthetic construct
  source 1..20: mol_type = other RNA
gcaggataaccacattgtgt

SEQ ID NO: 4117 - RNA, 20 nt, synthetic construct
  source 1..20: mol_type = other RNA
gcaggaggcggatttgctgg

SEQ ID NO: 4118 - RNA, 20 nt, synthetic construct
  source 1..20: mol_type = other RNA
gcagcacagcctagcagcca

SEQ ID NO: 4119 - RNA, 21 nt, synthetic construct
  source 1..21: mol_type = other RNA
gcagatgagaaggcacagacg

SEQ ID NO: 4120 - RNA, 20 nt, synthetic construct
  source 1..20: mol_type = other RNA
gcagatgagaaggcacagac

SEQ ID NO: 4121 - RNA, 21 nt, synthetic construct
  source 1..21: mol_type = other RNA
gcagaggtgaagcgaagtgca

SEQ ID NO: 4122 - RNA, 20 nt, synthetic construct
  source 1..20: mol_type = other RNA
gcagaggtgaaaaagttgca

SEQ ID NO: 4123 - RNA, 20 nt, synthetic construct
  source 1..20: mol_type = other RNA
gcagacggagaaggggacga

SEQ ID NO: 4124 - RNA, 20 nt, synthetic construct
  source 1..20: mol_type = other RNA
gcagaccaatttatgcctac

SEQ ID NO: 4125 - RNA, 20 nt, synthetic construct
  source 1..20: mol_type = other RNA
gcagacacatccagcgataa

SEQ ID NO: 4126 - RNA, 20 nt, synthetic construct
  source 1..20: mol_type = other RNA
gcagaagatctcaatctcgg

SEQ ID NO: 4127 - RNA, 20 nt, synthetic construct
  source 1..20: mol_type = other RNA
gcactcctccagcttataga

SEQ ID NO: 4128 - RNA, 20 nt, synthetic construct
  source 1..20: mol_type = other RNA
gcactagtaaactgagccag

SEQ ID NO: 4129 - RNA, 20 nt, synthetic construct
  source 1..20: mol_type = other RNA
gcacgggaccatgccgaacc

SEQ ID NO: 4130 - RNA, 20 nt, synthetic construct
  source 1..20: mol_type = other RNA
gcacggaggccttttggggt

SEQ ID NO: 4131 - RNA, 20 nt, synthetic construct
  source 1..20: mol_type = other RNA
gcacagcttggaggcttgaa

SEQ ID NO: 4132 - RNA, 21 nt, synthetic construct
  source 1..21: mol_type = other RNA
gcacagcctagcagccatgga

SEQ ID NO: 4133 - RNA, 20 nt, synthetic construct
  source 1..20: mol_type = other RNA
gcacagacggggagtccgcg

SEQ ID NO: 4134 - RNA, 20 nt, synthetic construct
  source 1..20: mol_type = other RNA
gcacagacctggccgttgcc

SEQ ID NO: 4135 - RNA, 20 nt, synthetic construct
  source 1..20: mol_type = other RNA
gcacacggtccggcagatga

SEQ ID NO: 4136 - RNA, 20 nt, synthetic construct
  source 1..20: mol_type = other RNA
gcaatttccgtccgaaggtt

SEQ ID NO: 4137 - RNA, 20 nt, synthetic construct
  source 1..20: mol_type = other RNA
gcaatgtcaacgaccgacct

SEQ ID NO: 4138 - RNA, 20 nt, synthetic construct
  source 1..20: mol_type = other RNA
gcaactttttcacctctgcc

SEQ ID NO: 4139 - RNA, 20 nt, synthetic construct
  source 1..20: mol_type = other RNA
gcaacggccaggtctgtgcc

SEQ ID NO: 4140 - RNA, 20 nt, synthetic construct
  source 1..20: mol_type = other RNA
gcaacataccttgatagtcc

SEQ ID NO: 4141 - RNA, 20 nt, synthetic construct
  source 1..20: mol_type = other RNA
gcaacaggagggatacatag

SEQ ID NO: 4142 - RNA, 21 nt, synthetic construct
  source 1..21: mol_type = other RNA
gcaaatccgcctcctgcctcc

SEQ ID NO: 4143 - RNA, 20 nt, synthetic construct
  source 1..20: mol_type = other RNA
gcaaatccagattgggactt

SEQ ID NO: 4144 - RNA, 20 nt, synthetic construct
  source 1..20: mol_type = other RNA
gcaaatatacatcgtatcca

SEQ ID NO: 4145 - RNA, 20 nt, synthetic construct
  source 1..20: mol_type = other RNA
gcaaagtttgtagtatgccc

SEQ ID NO: 4146 - RNA, 21 nt, synthetic construct
  source 1..21: mol_type = other RNA
gcaaagaattgcttgcctgag

SEQ ID NO: 4147 - RNA, 20 nt, synthetic construct
  source 1..20: mol_type = other RNA
gcaaacattatcgggactga

SEQ ID NO: 4148 - RNA, 20 nt, synthetic construct
  source 1..20: mol_type = other RNA
gcaaacacttggcacagacc

SEQ ID NO: 4149 - RNA, 20 nt, synthetic construct
  source 1..20: mol_type = other RNA
gatttgctgtgtttgctctg

SEQ ID NO: 4150 - RNA, 20 nt, synthetic construct
  source 1..20: mol_type = other RNA
gattggtggaggcaggaggc

SEQ ID NO: 4151 - RNA, 20 nt, synthetic construct
  source 1..20: mol_type = other RNA
gattgggacttcaatcccaa

SEQ ID NO: 4152 - RNA, 20 nt, synthetic construct
  source 1..20: mol_type = other RNA
gattggaggttggggactgc

SEQ ID NO: 4153 - RNA, 20 nt, synthetic construct
  source 1..20: mol_type = other RNA
gattgctggtggaaagattc

SEQ ID NO: 4154 - RNA, 21 nt, synthetic construct
  source 1..21: mol_type = other RNA
gattgagatcttctgcgacgc

SEQ ID NO: 4155 - RNA, 20 nt, synthetic construct
  source 1..20: mol_type = other RNA
gattgagatcttctgcgacg

SEQ ID NO: 4156 - RNA, 20 nt, synthetic construct
  source 1..20: mol_type = other RNA
gattgagaccttcgtctgcg

SEQ ID NO: 4157 - RNA, 21 nt, synthetic construct
  source 1..21: mol_type = other RNA
gattgacgataagggagaggc

SEQ ID NO: 4158 - RNA, 20 nt, synthetic construct
  source 1..20: mol_type = other RNA
gattgacgataagggagagg

SEQ ID NO: 4159 - RNA, 20 nt, synthetic construct
  source 1..20: mol_type = other RNA
gattgaatacatgcatacaa

SEQ ID NO: 4160 - RNA, 20 nt, synthetic construct
  source 1..20: mol_type = other RNA
gattcagcgccgacgggacg

SEQ ID NO: 4161 - RNA, 20 nt, synthetic construct
  source 1..20: mol_type = other RNA
gattaactagatgttctgga

SEQ ID NO: 4162 - RNA, 20 nt, synthetic construct
  source 1..20: mol_type = other RNA
gattaaaggtctttgtacta

SEQ ID NO: 4163 - RNA, 21 nt, synthetic construct
  source 1..21: mol_type = other RNA
gattaaagacaggtacagtag

SEQ ID NO: 4164 - RNA, 20 nt, synthetic construct
  source 1..20: mol_type = other RNA
gattaaagacaggtacagta

SEQ ID NO: 4165 - RNA, 20 nt, synthetic construct
  source 1..20: mol_type = other RNA
gatgttctccatgttcagcg

SEQ ID NO: 4166 - RNA, 20 nt, synthetic construct
  source 1..20: mol_type = other RNA
gatgtgatgttctccatgtt

SEQ ID NO: 4167 - RNA, 20 nt, synthetic construct
  source 1..20: mol_type = other RNA
gatggcccatgaccaagccc

SEQ ID NO: 4168 - RNA, 20 nt, synthetic construct
  source 1..20: mol_type = other RNA
gatgattaggcagaggtgaa

SEQ ID NO: 4169 - RNA, 20 nt, synthetic construct
  source 1..20: mol_type = other RNA
gatgatgtggtattgggggc

SEQ ID NO: 4170 - RNA, 20 nt, synthetic construct
  source 1..20: mol_type = other RNA
gatgagtgtttctcaaaggt

SEQ ID NO: 4171 - RNA, 20 nt, synthetic construct
  source 1..20: mol_type = other RNA
gatgaggcatagcagcagga

SEQ ID NO: 4172 - RNA, 20 nt, synthetic construct
  source 1..20: mol_type = other RNA
gatgagaaggcacagacggg

SEQ ID NO: 4173 - RNA, 20 nt, synthetic construct
  source 1..20: mol_type = other RNA
gatcttgcagagtttggtga

SEQ ID NO: 4174 - RNA, 20 nt, synthetic construct
  source 1..20: mol_type = other RNA
gatcttctagataccgcctc

SEQ ID NO: 4175 - RNA, 20 nt, synthetic construct
  source 1..20: mol_type = other RNA
gatctcgtactgaaggaaag

SEQ ID NO: 4176 - RNA, 20 nt, synthetic construct
  source 1..20: mol_type = other RNA
gatctcaatctcgggaacct

SEQ ID NO: 4177 - RNA, 20 nt, synthetic construct
  source 1..20: mol_type = other RNA
gatcggcagaggagccgaaa

SEQ ID NO: 4178 - RNA, 20 nt, synthetic construct
  source 1..20: mol_type = other RNA
gatcctcaaccaccagcacg

SEQ ID NO: 4179 - RNA, 20 nt, synthetic construct
  source 1..20: mol_type = other RNA
gatccatactgcggaactcc

SEQ ID NO: 4180 - RNA, 20 nt, synthetic construct
  source 1..20: mol_type = other RNA
gatccaactggtggtcggga

SEQ ID NO: 4181 - RNA, 20 nt, synthetic construct
  source 1..20: mol_type = other RNA
gatagtccagaagaaccaac

SEQ ID NO: 4182 - RNA, 20 nt, synthetic construct
  source 1..20: mol_type = other RNA
gataggataggggcatttgg

SEQ ID NO: 4183 - RNA, 20 nt, synthetic construct
  source 1..20: mol_type = other RNA
gatacgatgtatatttgcgg

SEQ ID NO: 4184 - RNA, 20 nt, synthetic construct
  source 1..20: mol_type = other RNA
gataatgtttgctccagacc

SEQ ID NO: 4185 - RNA, 20 nt, synthetic construct
  source 1..20: mol_type = other RNA
gataagggagaggcagtagt

SEQ ID NO: 4186 - RNA, 20 nt, synthetic construct
  source 1..20: mol_type = other RNA
gataaccacattgtgtaaat

SEQ ID NO: 4187 - RNA, 20 nt, synthetic construct
  source 1..20: mol_type = other RNA
gagtttggtgaaaggttgtg

SEQ ID NO: 4188 - RNA, 20 nt, synthetic construct
  source 1..20: mol_type = other RNA
gagtgcgaatccacactccg

SEQ ID NO: 4189 - RNA, 21 nt, synthetic construct
  source 1..21: mol_type = other RNA
gagtccctttttaccgctgtt

SEQ ID NO: 4190 - RNA, 20 nt, synthetic construct
  source 1..20: mol_type = other RNA
gagtcccaagcgaccccgag

SEQ ID NO: 4191 - RNA, 21 nt, synthetic construct
  source 1..21: mol_type = other RNA
gagtccaaggaatactaacat

SEQ ID NO: 4192 - RNA, 20 nt, synthetic construct
  source 1..20: mol_type = other RNA
gagtcattagttccccccag

SEQ ID NO: 4193 - RNA, 20 nt, synthetic construct
  source 1..20: mol_type = other RNA
gagtaactccacagtagctc

SEQ ID NO: 4194 - RNA, 20 nt, synthetic construct
  source 1..20: mol_type = other RNA
gaggtgaagcgaagtgcaca

SEQ ID NO: 4195 - RNA, 21 nt, synthetic construct
  source 1..21: mol_type = other RNA
gaggtgaaaaagttgcatggt

SEQ ID NO: 4196 - RNA, 20 nt, synthetic construct
  source 1..20: mol_type = other RNA
gaggtgaaaaagttgcatgg

SEQ ID NO: 4197 - RNA, 20 nt, synthetic construct
  source 1..20: mol_type = other RNA
gagggagttcttcttctagg

SEQ ID NO: 4198 - RNA, 20 nt, synthetic construct
  source 1..20: mol_type = other RNA
gaggcttgaacagtaggaca

SEQ ID NO: 4199 - RNA, 20 nt, synthetic construct
  source 1..20: mol_type = other RNA
gaggcatagcagcaggatga

SEQ ID NO: 4200 - RNA, 20 nt, synthetic construct
  source 1..20: mol_type = other RNA
gaggcaggtcccctagaaga

SEQ ID NO: 4201 - RNA, 20 nt, synthetic construct
  source 1..20: mol_type = other RNA
gaggcaggaggcggatttgc

SEQ ID NO: 4202 - RNA, 20 nt, synthetic construct
  source 1..20: mol_type = other RNA
gaggattggggaccctgcgc

SEQ ID NO: 4203 - RNA, 20 nt, synthetic construct
  source 1..20: mol_type = other RNA
gaggattcttgtcaacaaga

SEQ ID NO: 4204 - RNA, 20 nt, synthetic construct
  source 1..20: mol_type = other RNA
gaggagttgggggaggagat

SEQ ID NO: 4205 - RNA, 20 nt, synthetic construct
  source 1..20: mol_type = other RNA
gaggagccgaaaaggttcca

SEQ ID NO: 4206 - RNA, 20 nt, synthetic construct
  source 1..20: mol_type = other RNA
gaggactcttggactctctg

SEQ ID NO: 4207 - RNA, 20 nt, synthetic construct
  source 1..20: mol_type = other RNA
gaggacaggaggttggtgag

SEQ ID NO: 4208 - RNA, 21 nt, synthetic construct
  source 1..21: mol_type = other RNA
gaggacaacagagttatcagt

SEQ ID NO: 4209 - RNA, 21 nt, synthetic construct
  source 1..21: mol_type = other RNA
gaggacaaacgggcaacatac

SEQ ID NO: 4210 - RNA, 20 nt, synthetic construct
  source 1..20: mol_type = other RNA
gagctgaggcggtatctaga

SEQ ID NO: 4211 - RNA, 20 nt, synthetic construct
  source 1..20: mol_type = other RNA
gagcctgagggctccacccc

SEQ ID NO: 4212 - RNA, 20 nt, synthetic construct
  source 1..20: mol_type = other RNA
gagccaggagaaacgggctg

SEQ ID NO: 4213 - RNA, 20 nt, synthetic construct
  source 1..20: mol_type = other RNA
gagccaccagcagggaaata

SEQ ID NO: 4214 - RNA, 20 nt, synthetic construct
  source 1..20: mol_type = other RNA
gagcagtagtcatgcaggtt

SEQ ID NO: 4215 - RNA, 20 nt, synthetic construct
  source 1..20: mol_type = other RNA
gagattgagatcttctgcga

SEQ ID NO: 4216 - RNA, 21 nt, synthetic construct
  source 1..21: mol_type = other RNA
gagatgattaggcagaggtga

SEQ ID NO: 4217 - RNA, 20 nt, synthetic construct
  source 1..20: mol_type = other RNA
gagatgattaggcagaggtg

SEQ ID NO: 4218 - RNA, 20 nt, synthetic construct
  source 1..20: mol_type = other RNA
gagagtcccaagcgaccccg

SEQ ID NO: 4219 - RNA, 21 nt, synthetic construct
  source 1..21: mol_type = other RNA
gagagtaactccacagtagct

SEQ ID NO: 4220 - RNA, 20 nt, synthetic construct
  source 1..20: mol_type = other RNA
gagaggcagtagtcggaaca

SEQ ID NO: 4221 - RNA, 20 nt, synthetic construct
  source 1..20: mol_type = other RNA
gagagagtcccaagcgaccc

SEQ ID NO: 4222 - RNA, 20 nt, synthetic construct
  source 1..20: mol_type = other RNA
gagaccttcgtctgcgaggc

SEQ ID NO: 4223 - RNA, 20 nt, synthetic construct
  source 1..20: mol_type = other RNA
gagaagattgacgataaggg

SEQ ID NO: 4224 - RNA, 20 nt, synthetic construct
  source 1..20: mol_type = other RNA
gagaaagtgaaagcctgctt

SEQ ID NO: 4225 - RNA, 20 nt, synthetic construct
  source 1..20: mol_type = other RNA
gacttctttccttcagtacg

SEQ ID NO: 4226 - RNA, 20 nt, synthetic construct
  source 1..20: mol_type = other RNA
gactgtttgtttaaagactg

SEQ ID NO: 4227 - RNA, 20 nt, synthetic construct
  source 1..20: mol_type = other RNA
gactgggaggagttggggga

SEQ ID NO: 4228 - RNA, 20 nt, synthetic construct
  source 1..20: mol_type = other RNA
gactctaaggcttcccgata

SEQ ID NO: 4229 - RNA, 20 nt, synthetic construct
  source 1..20: mol_type = other RNA
gactcgtggtggacttctct

SEQ ID NO: 4230 - RNA, 21 nt, synthetic construct
  source 1..21: mol_type = other RNA
gactactgcctctcccttatc

SEQ ID NO: 4231 - RNA, 20 nt, synthetic construct
  source 1..20: mol_type = other RNA
gacgtaaacaaaggacgtcc

SEQ ID NO: 4232 - RNA, 20 nt, synthetic construct
  source 1..20: mol_type = other RNA
gacggggagtccgcgtaaag

SEQ ID NO: 4233 - RNA, 20 nt, synthetic construct
  source 1..20: mol_type = other RNA
gacgcaacccccactggctg

SEQ ID NO: 4234 - RNA, 20 nt, synthetic construct
  source 1..20: mol_type = other RNA
gaccttgggcaacattcggt

SEQ ID NO: 4235 - RNA, 20 nt, synthetic construct
  source 1..20: mol_type = other RNA
gaccttgaggcatacttcaa

SEQ ID NO: 4236 - RNA, 20 nt, synthetic construct
  source 1..20: mol_type = other RNA
gaccttcgtctgcgaggcga

SEQ ID NO: 4237 - RNA, 21 nt, synthetic construct
  source 1..21: mol_type = other RNA
gacctggccgttgccgggcaa

SEQ ID NO: 4238 - RNA, 20 nt, synthetic construct
  source 1..20: mol_type = other RNA
gacctgctgcgagcaaaaca

SEQ ID NO: 4239 - RNA, 20 nt, synthetic construct
  source 1..20: mol_type = other RNA
gacctagtagtcagttatgt

SEQ ID NO: 4240 - RNA, 20 nt, synthetic construct
  source 1..20: mol_type = other RNA
gacccttctcggggtcgctt

SEQ ID NO: 4241 - RNA, 20 nt, synthetic construct
  source 1..20: mol_type = other RNA
gacccttataaagaatttgg

SEQ ID NO: 4242 - RNA, 20 nt, synthetic construct
  source 1..20: mol_type = other RNA
gaccctgcgctgaacatgga

SEQ ID NO: 4243 - RNA, 21 nt, synthetic construct
  source 1..21: mol_type = other RNA
gaccccttctcgtgttacagg

SEQ ID NO: 4244 - RNA, 21 nt, synthetic construct
  source 1..21: mol_type = other RNA
gaccccgagaagggtcgtccg

SEQ ID NO: 4245 - RNA, 20 nt, synthetic construct
  source 1..20: mol_type = other RNA
gaccccgagaagggtcgtcc

SEQ ID NO: 4246 - RNA, 20 nt, synthetic construct
  source 1..20: mol_type = other RNA
gaccaccgtgaacgcccacc

SEQ ID NO: 4247 - RNA, 20 nt, synthetic construct
  source 1..20: mol_type = other RNA
gaccaagccccagccagtgg

SEQ ID NO: 4248 - RNA, 20 nt, synthetic construct
  source 1..20: mol_type = other RNA
gacatgaacaagagatgatt

SEQ ID NO: 4249 - RNA, 20 nt, synthetic construct
  source 1..20: mol_type = other RNA
gacatactttccaatcaata

SEQ ID NO: 4250 - RNA, 20 nt, synthetic construct
  source 1..20: mol_type = other RNA
gacataacccataaaattca

SEQ ID NO: 4251 - RNA, 20 nt, synthetic construct
  source 1..20: mol_type = other RNA
gacaggtacagtagaagaat

SEQ ID NO: 4252 - RNA, 20 nt, synthetic construct
  source 1..20: mol_type = other RNA
gacaggaaggcagcctaccc

SEQ ID NO: 4253 - RNA, 20 nt, synthetic construct
  source 1..20: mol_type = other RNA
gacactatttacacactcta

SEQ ID NO: 4254 - RNA, 20 nt, synthetic construct
  source 1..20: mol_type = other RNA
gacacctggccagacgccaa

SEQ ID NO: 4255 - RNA, 21 nt, synthetic construct
  source 1..21: mol_type = other RNA
gacacacggtagttcccccta

SEQ ID NO: 4256 - RNA, 20 nt, synthetic construct
  source 1..20: mol_type = other RNA
gacacacggtagttccccct

SEQ ID NO: 4257 - RNA, 20 nt, synthetic construct
  source 1..20: mol_type = other RNA
gacaagaatcctcacaatac

SEQ ID NO: 4258 - RNA, 20 nt, synthetic construct
  source 1..20: mol_type = other RNA
gacaagaaatgtgaaaccac

SEQ ID NO: 4259 - RNA, 21 nt, synthetic construct
  source 1..21: mol_type = other RNA
gacaacagagttatcagtccc

SEQ ID NO: 4260 - RNA, 20 nt, synthetic construct
  source 1..20: mol_type = other RNA
gacaacagagttatcagtcc

SEQ ID NO: 4261 - RNA, 21 nt, synthetic construct
  source 1..21: mol_type = other RNA
gacaaacgggcaacatacctt

SEQ ID NO: 4262 - RNA, 20 nt, synthetic construct
  source 1..20: mol_type = other RNA
gacaaacgggcaacatacct

SEQ ID NO: 4263 - RNA, 20 nt, synthetic construct
  source 1..20: mol_type = other RNA
gacaaaagaaaattggtaac

SEQ ID NO: 4264 - RNA, 21 nt, synthetic construct
  source 1..21: mol_type = other RNA
gaattgcttgcctgagtgcag

SEQ ID NO: 4265 - RNA, 20 nt, synthetic construct
  source 1..20: mol_type = other RNA
gaatcccagaggattgctgg

SEQ ID NO: 4266 - RNA, 20 nt, synthetic construct
  source 1..20: mol_type = other RNA
gaatatggtgacccacaaaa

SEQ ID NO: 4267 - RNA, 21 nt, synthetic construct
  source 1..21: mol_type = other RNA
gaatactaacattgaggttcc

SEQ ID NO: 4268 - RNA, 20 nt, synthetic construct
  source 1..20: mol_type = other RNA
gaagttatgggtccttgcca

SEQ ID NO: 4269 - RNA, 20 nt, synthetic construct
  source 1..20: mol_type = other RNA
gaagtcagaaggcaaaaacg

SEQ ID NO: 4270 - RNA, 20 nt, synthetic construct
  source 1..20: mol_type = other RNA
gaaggtttggtacagcaaca

SEQ ID NO: 4271 - RNA, 20 nt, synthetic construct
  source 1..20: mol_type = other RNA
gaaggtctcaatcgccgcgt

SEQ ID NO: 4272 - RNA, 20 nt, synthetic construct
  source 1..20: mol_type = other RNA
gaagggtcgtccgcaggatt

SEQ ID NO: 4273 - RNA, 20 nt, synthetic construct
  source 1..20: mol_type = other RNA
gaaggggacgagagagtccc

SEQ ID NO: 4274 - RNA, 20 nt, synthetic construct
  source 1..20: mol_type = other RNA
gaaggcgggtatattatata

SEQ ID NO: 4275 - RNA, 20 nt, synthetic construct
  source 1..20: mol_type = other RNA
gaaggcacagacggggagtc

SEQ ID NO: 4276 - RNA, 20 nt, synthetic construct
  source 1..20: mol_type = other RNA
gaaggaaagaagtcagaagg

SEQ ID NO: 4277 - RNA, 20 nt, synthetic construct
  source 1..20: mol_type = other RNA
gaagcgaagtgcacacggtc

SEQ ID NO: 4278 - RNA, 21 nt, synthetic construct
  source 1..21: mol_type = other RNA
gaagattgacgataagggaga

SEQ ID NO: 4279 - RNA, 20 nt, synthetic construct
  source 1..20: mol_type = other RNA
gaagattgacgataagggag

SEQ ID NO: 4280 - RNA, 20 nt, synthetic construct
  source 1..20: mol_type = other RNA
gaagatgaggcatagcagca

SEQ ID NO: 4281 - RNA, 21 nt, synthetic construct
  source 1..21: mol_type = other RNA
gaagatctcgtactgaaggaa

SEQ ID NO: 4282 - RNA, 20 nt, synthetic construct
  source 1..20: mol_type = other RNA
gaagatctcgtactgaagga

SEQ ID NO: 4283 - RNA, 20 nt, synthetic construct
  source 1..20: mol_type = other RNA
gaagaagaactccctcgcct

SEQ ID NO: 4284 - RNA, 20 nt, synthetic construct
  source 1..20: mol_type = other RNA
gaagaaccaacaagaagatg

SEQ ID NO: 4285 - RNA, 20 nt, synthetic construct
  source 1..20: mol_type = other RNA
gaactggagccaccagcagg

SEQ ID NO: 4286 - RNA, 20 nt, synthetic construct
  source 1..20: mol_type = other RNA
gaactcctagccgcttgttt

SEQ ID NO: 4287 - RNA, 20 nt, synthetic construct
  source 1..20: mol_type = other RNA
gaactccctcgcctcgcaga

SEQ ID NO: 4288 - RNA, 20 nt, synthetic construct
  source 1..20: mol_type = other RNA
gaactaccgtgtgtcttggc

SEQ ID NO: 4289 - RNA, 21 nt, synthetic construct
  source 1..21: mol_type = other RNA
gaacgcccaccgaatgttgcc

SEQ ID NO: 4290 - RNA, 20 nt, synthetic construct
  source 1..20: mol_type = other RNA
gaacctttaccccgttgccc

SEQ ID NO: 4291 - RNA, 20 nt, synthetic construct
  source 1..20: mol_type = other RNA
gaacctgcatgactactgct

SEQ ID NO: 4292 - RNA, 20 nt, synthetic construct
  source 1..20: mol_type = other RNA
gaacatggagaacatcacat

SEQ ID NO: 4293 - RNA, 20 nt, synthetic construct
  source 1..20: mol_type = other RNA
gaacatcacatcaggattcc

SEQ ID NO: 4294 - RNA, 20 nt, synthetic construct
  source 1..20: mol_type = other RNA
gaacagtaggacatgaacaa

SEQ ID NO: 4295 - RNA, 20 nt, synthetic construct
  source 1..20: mol_type = other RNA
gaacagggtttactgctcct

SEQ ID NO: 4296 - RNA, 20 nt, synthetic construct
  source 1..20: mol_type = other RNA
gaacacatcatacaaaaaat

SEQ ID NO: 4297 - RNA, 20 nt, synthetic construct
  source 1..20: mol_type = other RNA
gaacaatgctcaggagactc

SEQ ID NO: 4298 - RNA, 20 nt, synthetic construct
  source 1..20: mol_type = other RNA
gaacaagatctacagcatgg

SEQ ID NO: 4299 - RNA, 20 nt, synthetic construct
  source 1..20: mol_type = other RNA
gaacaagagatgattaggca

SEQ ID NO: 4300 - RNA, 20 nt, synthetic construct
  source 1..20: mol_type = other RNA
gaaatacaggcctctcactc

SEQ ID NO: 4301 - RNA, 21 nt, synthetic construct
  source 1..21: mol_type = other RNA
gaaagtgaaagcctgcttaga

SEQ ID NO: 4302 - RNA, 20 nt, synthetic construct
  source 1..20: mol_type = other RNA
gaaagtatgtcaacgaattg

SEQ ID NO: 4303 - RNA, 20 nt, synthetic construct
  source 1..20: mol_type = other RNA
gaaaggccttgtaagttggc

SEQ ID NO: 4304 - RNA, 21 nt, synthetic construct
  source 1..21: mol_type = other RNA
gaaagccctacgaaccactga

SEQ ID NO: 4305 - RNA, 20 nt, synthetic construct
  source 1..20: mol_type = other RNA
gaaagccaaacagtggggga

SEQ ID NO: 4306 - RNA, 21 nt, synthetic construct
  source 1..21: mol_type = other RNA
gaaagacaccaaatactctat

SEQ ID NO: 4307 - RNA, 20 nt, synthetic construct
  source 1..20: mol_type = other RNA
gaaagacaccaaatactcta

SEQ ID NO: 4308 - RNA, 20 nt, synthetic construct
  source 1..20: mol_type = other RNA
gaaacccagcccgaatgctc

SEQ ID NO: 4309 - RNA, 21 nt, synthetic construct
  source 1..21: mol_type = other RNA
gaaacactcatcctcaggcca

SEQ ID NO: 4310 - RNA, 20 nt, synthetic construct
  source 1..20: mol_type = other RNA
gaaaattggtaacagcggta

SEQ ID NO: 4311 - RNA, 21 nt, synthetic construct
  source 1..21: mol_type = other RNA
gaaaattgagagaagtccacc

SEQ ID NO: 4312 - RNA, 21 nt, synthetic construct
  source 1..21: mol_type = other RNA
gaaaagatggtgttttccaat

SEQ ID NO: 4313 - RNA, 20 nt, synthetic construct
  source 1..20: mol_type = other RNA
gaaaagatggtgttttccaa

SEQ ID NO: 4314 - RNA, 20 nt, synthetic construct
  source 1..20: mol_type = other RNA
gaaaaaccccgcctgtaaca

SEQ ID NO: 4315 - RNA, 20 nt, synthetic construct
  source 1..20: mol_type = other RNA
cttttggggtggagccctca

SEQ ID NO: 4316 - RNA, 21 nt, synthetic construct
  source 1..21: mol_type = other RNA
cttttggaagagaaaccgtta

SEQ ID NO: 4317 - RNA, 20 nt, synthetic construct
  source 1..20: mol_type = other RNA
cttttctcattaactgtaag

SEQ ID NO: 4318 - RNA, 20 nt, synthetic construct
  source 1..20: mol_type = other RNA
ctttgtttacgtcccgtcgg

SEQ ID NO: 4319 - RNA, 20 nt, synthetic construct
  source 1..20: mol_type = other RNA
ctttgtactaggaggctgta

SEQ ID NO: 4320 - RNA, 21 nt, synthetic construct
  source 1..21: mol_type = other RNA
ctttggataaaacctagcagg

SEQ ID NO: 4321 - RNA, 20 nt, synthetic construct
  source 1..20: mol_type = other RNA
ctttgagaaacactcatcct

SEQ ID NO: 4322 - RNA, 20 nt, synthetic construct
  source 1..20: mol_type = other RNA
ctttctgtgtaaacaatacc

SEQ ID NO: 4323 - RNA, 20 nt, synthetic construct
  source 1..20: mol_type = other RNA
ctttcggaaaattcctatgg

SEQ ID NO: 4324 - RNA, 20 nt, synthetic construct
  source 1..20: mol_type = other RNA
ctttccaccagcaatcctct

SEQ ID NO: 4325 - RNA, 20 nt, synthetic construct
  source 1..20: mol_type = other RNA
ctttaggcccatattagtgt

SEQ ID NO: 4326 - RNA, 20 nt, synthetic construct
  source 1..20: mol_type = other RNA
ctttaaacaaacagtctttg

SEQ ID NO: 4327 - RNA, 20 nt, synthetic construct
  source 1..20: mol_type = other RNA
cttgttgacaagaatcctca

SEQ ID NO: 4328 - RNA, 20 nt, synthetic construct
  source 1..20: mol_type = other RNA
cttgttcatgtcctactgtt

SEQ ID NO: 4329 - RNA, 20 nt, synthetic construct
  source 1..20: mol_type = other RNA
cttgtctcacttttggaaga

SEQ ID NO: 4330 - RNA, 20 nt, synthetic construct
  source 1..20: mol_type = other RNA
cttgtcaacaagaaaaaccc

SEQ ID NO: 4331 - RNA, 20 nt, synthetic construct
  source 1..20: mol_type = other RNA
cttgtaagttggcgagaaag

SEQ ID NO: 4332 - RNA, 20 nt, synthetic construct
  source 1..20: mol_type = other RNA
cttggtgtaaatgtatatta

SEQ ID NO: 4333 - RNA, 20 nt, synthetic construct
  source 1..20: mol_type = other RNA
cttgggtggctttggggcat

SEQ ID NO: 4334 - RNA, 20 nt, synthetic construct
  source 1..20: mol_type = other RNA
cttggcacagacctggccgt

SEQ ID NO: 4335 - RNA, 20 nt, synthetic construct
  source 1..20: mol_type = other RNA
cttgcctgagtgcagtatgg

SEQ ID NO: 4336 - RNA, 20 nt, synthetic construct
  source 1..20: mol_type = other RNA
cttgaacagtaggacatgaa

SEQ ID NO: 4337 - RNA, 20 nt, synthetic construct
  source 1..20: mol_type = other RNA
cttcttttctcattaactgt

SEQ ID NO: 4338 - RNA, 20 nt, synthetic construct
  source 1..20: mol_type = other RNA
cttctgcgacgcggcgattg

SEQ ID NO: 4339 - RNA, 20 nt, synthetic construct
  source 1..20: mol_type = other RNA
cttcctgtctggcgattggt

SEQ ID NO: 4340 - RNA, 20 nt, synthetic construct
  source 1..20: mol_type = other RNA
cttcctattaacaggcctat

SEQ ID NO: 4341 - RNA, 20 nt, synthetic construct
  source 1..20: mol_type = other RNA
cttccggaaactactgttgt

SEQ ID NO: 4342 - RNA, 20 nt, synthetic construct
  source 1..20: mol_type = other RNA
cttccaatgacataacccat

SEQ ID NO: 4343 - RNA, 20 nt, synthetic construct
  source 1..20: mol_type = other RNA
cttccaaattaacacccacc

SEQ ID NO: 4344 - RNA, 20 nt, synthetic construct
  source 1..20: mol_type = other RNA
cttcacctctgcacgtcgca

SEQ ID NO: 4345 - RNA, 20 nt, synthetic construct
  source 1..20: mol_type = other RNA
cttcaaagactgtttgttta

SEQ ID NO: 4346 - RNA, 20 nt, synthetic construct
  source 1..20: mol_type = other RNA
cttatgagtccaaggaatac

SEQ ID NO: 4347 - RNA, 20 nt, synthetic construct
  source 1..20: mol_type = other RNA
cttatcgtcaatcttctcga

SEQ ID NO: 4348 - RNA, 20 nt, synthetic construct
  source 1..20: mol_type = other RNA
cttatccaatggtaaatatt

SEQ ID NO: 4349 - RNA, 20 nt, synthetic construct
  source 1..20: mol_type = other RNA
cttacagttaatgagaaaag

SEQ ID NO: 4350 - RNA, 21 nt, synthetic construct
  source 1..21: mol_type = other RNA
cttacaaggcctttctgtgta

SEQ ID NO: 4351 - RNA, 20 nt, synthetic construct
  source 1..20: mol_type = other RNA
cttacaaggcctttctgtgt

SEQ ID NO: 4352 - RNA, 20 nt, synthetic construct
  source 1..20: mol_type = other RNA
ctgtttgtttaaagactggg

SEQ ID NO: 4353 - RNA, 20 nt, synthetic construct
  source 1..20: mol_type = other RNA
ctgtttggctttcagttata

SEQ ID NO: 4354 - RNA, 20 nt, synthetic construct
  source 1..20: mol_type = other RNA
ctgttgttagacgacgaggc

SEQ ID NO: 4355 - RNA, 20 nt, synthetic construct
  source 1..20: mol_type = other RNA
ctgttgctgtaccaaacctt

SEQ ID NO: 4356 - RNA, 20 nt, synthetic construct
  source 1..20: mol_type = other RNA
ctgttcaagcctccaagctg

SEQ ID NO: 4357 - RNA, 20 nt, synthetic construct
  source 1..20: mol_type = other RNA
ctgttaataggaagttttct

SEQ ID NO: 4358 - RNA, 20 nt, synthetic construct
  source 1..20: mol_type = other RNA
ctgtgtttgctctgaaggct

SEQ ID NO: 4359 - RNA, 20 nt, synthetic construct
  source 1..20: mol_type = other RNA
ctgtgctgccaactggatcc

SEQ ID NO: 4360 - RNA, 20 nt, synthetic construct
  source 1..20: mol_type = other RNA
ctgtgccttgggtggctttg

SEQ ID NO: 4361 - RNA, 20 nt, synthetic construct
  source 1..20: mol_type = other RNA
ctgtgccaagtgtttgctga

SEQ ID NO: 4362 - RNA, 20 nt, synthetic construct
  source 1..20: mol_type = other RNA
ctgtctttaatcctcattgg

SEQ ID NO: 4363 - RNA, 20 nt, synthetic construct
  source 1..20: mol_type = other RNA
ctgtctggcgattggtggag

SEQ ID NO: 4364 - RNA, 21 nt, synthetic construct
  source 1..21: mol_type = other RNA
ctgtatttccctgctggtggc

SEQ ID NO: 4365 - RNA, 20 nt, synthetic construct
  source 1..20: mol_type = other RNA
ctgtaccaaaccttcggacg

SEQ ID NO: 4366 - RNA, 20 nt, synthetic construct
  source 1..20: mol_type = other RNA
ctgtacagacttggccccca

SEQ ID NO: 4367 - RNA, 20 nt, synthetic construct
  source 1..20: mol_type = other RNA
ctgtaacacgagaaggggtc

SEQ ID NO: 4368 - RNA, 20 nt, synthetic construct
  source 1..20: mol_type = other RNA
ctggtgcgcagaccaattta

SEQ ID NO: 4369 - RNA, 20 nt, synthetic construct
  source 1..20: mol_type = other RNA
ctgggtttcaccccaccgca

SEQ ID NO: 4370 - RNA, 20 nt, synthetic construct
  source 1..20: mol_type = other RNA
ctgggtgggtgttaatttgg

SEQ ID NO: 4371 - RNA, 20 nt, synthetic construct
  source 1..20: mol_type = other RNA
ctggggggaactaatgactc

SEQ ID NO: 4372 - RNA, 20 nt, synthetic construct
  source 1..20: mol_type = other RNA
ctgggaggagttgggggagg

SEQ ID NO: 4373 - RNA, 20 nt, synthetic construct
  source 1..20: mol_type = other RNA
ctggctggggcttggtcatg

SEQ ID NO: 4374 - RNA, 20 nt, synthetic construct
  source 1..20: mol_type = other RNA
ctggcgattggtggaggcag

SEQ ID NO: 4375 - RNA, 20 nt, synthetic construct
  source 1..20: mol_type = other RNA
ctggccgttgccgggcaacg

SEQ ID NO: 4376 - RNA, 20 nt, synthetic construct
  source 1..20: mol_type = other RNA
ctggccaggtgtccttgttg

SEQ ID NO: 4377 - RNA, 20 nt, synthetic construct
  source 1..20: mol_type = other RNA
ctggccagacgccaacaagg

SEQ ID NO: 4378 - RNA, 20 nt, synthetic construct
  source 1..20: mol_type = other RNA
ctggatccaactggtggtcg

SEQ ID NO: 4379 - RNA, 20 nt, synthetic construct
  source 1..20: mol_type = other RNA
ctggaattagaggacaaacg

SEQ ID NO: 4380 - RNA, 20 nt, synthetic construct
  source 1..20: mol_type = other RNA
ctgctggtggctccagttca

SEQ ID NO: 4381 - RNA, 20 nt, synthetic construct
  source 1..20: mol_type = other RNA
ctgctgcgagcaaaacaagc

SEQ ID NO: 4382 - RNA, 21 nt, synthetic construct
  source 1..21: mol_type = other RNA
ctgcgagcaaaacaagcggct

SEQ ID NO: 4383 - RNA, 20 nt, synthetic construct
  source 1..20: mol_type = other RNA
ctgcgagcaaaacaagcggc

SEQ ID NO: 4384 - RNA, 21 nt, synthetic construct
  source 1..21: mol_type = other RNA
ctgcgaattttggccaagaca

SEQ ID NO: 4385 - RNA, 20 nt, synthetic construct
  source 1..20: mol_type = other RNA
ctgccttcctgtctggcgat

SEQ ID NO: 4386 - RNA, 20 nt, synthetic construct
  source 1..20: mol_type = other RNA
ctgcctccaccaatcgccag

SEQ ID NO: 4387 - RNA, 20 nt, synthetic construct
  source 1..20: mol_type = other RNA
ctgccgttccgaccgaccac

SEQ ID NO: 4388 - RNA, 20 nt, synthetic construct
  source 1..20: mol_type = other RNA
ctgccggaccgtgtgcactt

SEQ ID NO: 4389 - RNA, 20 nt, synthetic construct
  source 1..20: mol_type = other RNA
ctgcatgactactgctcaag

SEQ ID NO: 4390 - RNA, 20 nt, synthetic construct
  source 1..20: mol_type = other RNA
ctgcaagatcccagagtgag

SEQ ID NO: 4391 - RNA, 20 nt, synthetic construct
  source 1..20: mol_type = other RNA
ctgagtgcagtatggtgagg

SEQ ID NO: 4392 - RNA, 20 nt, synthetic construct
  source 1..20: mol_type = other RNA
ctgagggctccaccccaaaa

SEQ ID NO: 4393 - RNA, 20 nt, synthetic construct
  source 1..20: mol_type = other RNA
ctgaggatgagtgtttctca

SEQ ID NO: 4394 - RNA, 20 nt, synthetic construct
  source 1..20: mol_type = other RNA
ctgacttctttccttcagta

SEQ ID NO: 4395 - RNA, 20 nt, synthetic construct
  source 1..20: mol_type = other RNA
ctgactactaggtctctaga

SEQ ID NO: 4396 - RNA, 20 nt, synthetic construct
  source 1..20: mol_type = other RNA
ctgacgcaacccccactggc

SEQ ID NO: 4397 - RNA, 20 nt, synthetic construct
  source 1..20: mol_type = other RNA
ctgaaggaaagaagtcagaa

SEQ ID NO: 4398 - RNA, 21 nt, synthetic construct
  source 1..21: mol_type = other RNA
ctgaactggagccaccagcag

SEQ ID NO: 4399 - RNA, 20 nt, synthetic construct
  source 1..20: mol_type = other RNA
ctgaactggagccaccagca

SEQ ID NO: 4400 - RNA, 20 nt, synthetic construct
  source 1..20: mol_type = other RNA
ctgaaagccaaacagtgggg

SEQ ID NO: 4401 - RNA, 20 nt, synthetic construct
  source 1..20: mol_type = other RNA
ctctttgttttgttagggtt

SEQ ID NO: 4402 - RNA, 20 nt, synthetic construct
  source 1..20: mol_type = other RNA
ctcttccaaaagtgagacaa

SEQ ID NO: 4403 - RNA, 20 nt, synthetic construct
  source 1..20: mol_type = other RNA
ctcttatgtaagaccttggg

SEQ ID NO: 4404 - RNA, 20 nt, synthetic construct
  source 1..20: mol_type = other RNA
ctctgtatcgggaagcctta

SEQ ID NO: 4405 - RNA, 21 nt, synthetic construct
  source 1..21: mol_type = other RNA
ctctgggattctttcccgacc

SEQ ID NO: 4406 - RNA, 20 nt, synthetic construct
  source 1..20: mol_type = other RNA
ctctgggatcttgcagagtt

SEQ ID NO: 4407 - RNA, 20 nt, synthetic construct
  source 1..20: mol_type = other RNA
ctctgccgatccatactgcg

SEQ ID NO: 4408 - RNA, 20 nt, synthetic construct
  source 1..20: mol_type = other RNA
ctctgcaagatcccagagtg

SEQ ID NO: 4409 - RNA, 21 nt, synthetic construct
  source 1..21: mol_type = other RNA
ctctgaaggctggatccaact

SEQ ID NO: 4410 - RNA, 20 nt, synthetic construct
  source 1..20: mol_type = other RNA
ctctgaaggctggatccaac

SEQ ID NO: 4411 - RNA, 20 nt, synthetic construct
  source 1..20: mol_type = other RNA
ctctctgcaatgtcaacgac

SEQ ID NO: 4412 - RNA, 20 nt, synthetic construct
  source 1..20: mol_type = other RNA
ctctcgtccccttctccgtc

SEQ ID NO: 4413 - RNA, 20 nt, synthetic construct
  source 1..20: mol_type = other RNA
ctctcactctgggatcttgc

SEQ ID NO: 4414 - RNA, 21 nt, synthetic construct
  source 1..21: mol_type = other RNA
ctctataacggtttctcttcc

SEQ ID NO: 4415 - RNA, 20 nt, synthetic construct
  source 1..20: mol_type = other RNA
ctctataacggtttctcttc

SEQ ID NO: 4416 - RNA, 20 nt, synthetic construct
  source 1..20: mol_type = other RNA
ctctagatgctggatcttcc

SEQ ID NO: 4417 - RNA, 20 nt, synthetic construct
  source 1..20: mol_type = other RNA
ctctaaggcttcccgataca

SEQ ID NO: 4418 - RNA, 20 nt, synthetic construct
  source 1..20: mol_type = other RNA
ctcgaggattggggaccctg

SEQ ID NO: 4419 - RNA, 20 nt, synthetic construct
  source 1..20: mol_type = other RNA
ctcgagaagattgacgataa

SEQ ID NO: 4420 - RNA, 20 nt, synthetic construct
  source 1..20: mol_type = other RNA
ctcctggctcagtttactag

SEQ ID NO: 4421 - RNA, 20 nt, synthetic construct
  source 1..20: mol_type = other RNA
ctcctgcctccaccaatcgc

SEQ ID NO: 4422 - RNA, 20 nt, synthetic construct
  source 1..20: mol_type = other RNA
ctcctaccttgttggcgtct

SEQ ID NO: 4423 - RNA, 20 nt, synthetic construct
  source 1..20: mol_type = other RNA
ctccctcgcctcgcagacga

SEQ ID NO: 4424 - RNA, 20 nt, synthetic construct
  source 1..20: mol_type = other RNA
ctcccataggaattttccga

SEQ ID NO: 4425 - RNA, 21 nt, synthetic construct
  source 1..21: mol_type = other RNA
ctccatgttcagcgcagggtc

SEQ ID NO: 4426 - RNA, 20 nt, synthetic construct
  source 1..20: mol_type = other RNA
ctccagacctgctgcgagca

SEQ ID NO: 4427 - RNA, 21 nt, synthetic construct
  source 1..21: mol_type = other RNA
ctccaccccaaaaggcctccg

SEQ ID NO: 4428 - RNA, 20 nt, synthetic construct
  source 1..20: mol_type = other RNA
ctccaccaatcgccagacag

SEQ ID NO: 4429 - RNA, 20 nt, synthetic construct
  source 1..20: mol_type = other RNA
ctccaagctgtgccttgggt

SEQ ID NO: 4430 - RNA, 20 nt, synthetic construct
  source 1..20: mol_type = other RNA
ctccaacttgtcctggttat

SEQ ID NO: 4431 - RNA, 20 nt, synthetic construct
  source 1..20: mol_type = other RNA
ctcatcctcaggccatgcag

SEQ ID NO: 4432 - RNA, 20 nt, synthetic construct
  source 1..20: mol_type = other RNA
ctcaggctcagggcatacta

SEQ ID NO: 4433 - RNA, 20 nt, synthetic construct
  source 1..20: mol_type = other RNA
ctcaccatactgcactcagg

SEQ ID NO: 4434 - RNA, 20 nt, synthetic construct
  source 1..20: mol_type = other RNA
ctcaccaacctcctgtcctc

SEQ ID NO: 4435 - RNA, 20 nt, synthetic construct
  source 1..20: mol_type = other RNA
ctcacaataccgcagagtct

SEQ ID NO: 4436 - RNA, 21 nt, synthetic construct
  source 1..21: mol_type = other RNA
ctcaatctcgggaacctcaat

SEQ ID NO: 4437 - RNA, 20 nt, synthetic construct
  source 1..20: mol_type = other RNA
ctcaagatgctgtacagact

SEQ ID NO: 4438 - RNA, 20 nt, synthetic construct
  source 1..20: mol_type = other RNA
ctatttacacactctatgga

SEQ ID NO: 4439 - RNA, 20 nt, synthetic construct
  source 1..20: mol_type = other RNA
ctattgattggaaagtatgt

SEQ ID NO: 4440 - RNA, 20 nt, synthetic construct
  source 1..20: mol_type = other RNA
ctattaacaggcctattgat

SEQ ID NO: 4441 - RNA, 21 nt, synthetic construct
  source 1..21: mol_type = other RNA
ctatgtgttgtttctctctta

SEQ ID NO: 4442 - RNA, 20 nt, synthetic construct
  source 1..20: mol_type = other RNA
ctatcctatcaacacttccg

SEQ ID NO: 4443 - RNA, 20 nt, synthetic construct
  source 1..20: mol_type = other RNA
ctataacggtttctcttcca

SEQ ID NO: 4444 - RNA, 21 nt, synthetic construct
  source 1..21: mol_type = other RNA
ctagtagtcagttatgtcaac

SEQ ID NO: 4445 - RNA, 20 nt, synthetic construct
  source 1..20: mol_type = other RNA
ctagtaaactgagccaggag

SEQ ID NO: 4446 - RNA, 21 nt, synthetic construct
  source 1..21: mol_type = other RNA
ctaggttttatccaaaggtta

SEQ ID NO: 4447 - RNA, 20 nt, synthetic construct
  source 1..20: mol_type = other RNA
ctagctacctgggtgggtgt

SEQ ID NO: 4448 - RNA, 20 nt, synthetic construct
  source 1..20: mol_type = other RNA
ctagccgcttgttttgctcg

SEQ ID NO: 4449 - RNA, 20 nt, synthetic construct
  source 1..20: mol_type = other RNA
ctagcaggcataatcaattg

SEQ ID NO: 4450 - RNA, 20 nt, synthetic construct
  source 1..20: mol_type = other RNA
ctagagtcattagttccccc

SEQ ID NO: 4451 - RNA, 20 nt, synthetic construct
  source 1..20: mol_type = other RNA
ctagactctgcggtattgtg

SEQ ID NO: 4452 - RNA, 20 nt, synthetic construct
  source 1..20: mol_type = other RNA
ctagaagatctcgtactgaa

SEQ ID NO: 4453 - RNA, 21 nt, synthetic construct
  source 1..21: mol_type = other RNA
ctactgttgttagacgacgag

SEQ ID NO: 4454 - RNA, 20 nt, synthetic construct
  source 1..20: mol_type = other RNA
ctactgttgttagacgacga

SEQ ID NO: 4455 - RNA, 20 nt, synthetic construct
  source 1..20: mol_type = other RNA
ctactaggtctctagatgct

SEQ ID NO: 4456 - RNA, 20 nt, synthetic construct
  source 1..20: mol_type = other RNA
ctacgaaccactgaacaaat

SEQ ID NO: 4457 - RNA, 20 nt, synthetic construct
  source 1..20: mol_type = other RNA
ctaccttgttggcgtctggc

SEQ ID NO: 4458 - RNA, 21 nt, synthetic construct
  source 1..21: mol_type = other RNA
ctaatgactctagctacctgg

SEQ ID NO: 4459 - RNA, 20 nt, synthetic construct
  source 1..20: mol_type = other RNA
ctaatatgggcctaaagttc

SEQ ID NO: 4460 - RNA, 20 nt, synthetic construct
  source 1..20: mol_type = other RNA
ctaacaacagtagtttccgg

SEQ ID NO: 4461 - RNA, 20 nt, synthetic construct
  source 1..20: mol_type = other RNA
cgttgccgggcaacggggta

SEQ ID NO: 4462 - RNA, 21 nt, synthetic construct
  source 1..21: mol_type = other RNA
cgttgacattgcagagagtcc

SEQ ID NO: 4463 - RNA, 20 nt, synthetic construct
  source 1..20: mol_type = other RNA
cgttgacattgcagagagtc

SEQ ID NO: 4464 - RNA, 20 nt, synthetic construct
  source 1..20: mol_type = other RNA
cgttccgaccgaccacgggg

SEQ ID NO: 4465 - RNA, 20 nt, synthetic construct
  source 1..20: mol_type = other RNA
cgttcacggtggtctccatg

SEQ ID NO: 4466 - RNA, 20 nt, synthetic construct
  source 1..20: mol_type = other RNA
cgtgtgtcttggccaaaatt

SEQ ID NO: 4467 - RNA, 21 nt, synthetic construct
  source 1..21: mol_type = other RNA
cgtgctggtggttgaggatcc

SEQ ID NO: 4468 - RNA, 20 nt, synthetic construct
  source 1..20: mol_type = other RNA
cgtgcggtggggtgaaaccc

SEQ ID NO: 4469 - RNA, 20 nt, synthetic construct
  source 1..20: mol_type = other RNA
cgtgcagaggtgaagcgaag

SEQ ID NO: 4470 - RNA, 20 nt, synthetic construct
  source 1..20: mol_type = other RNA
cgtgaacgcccaccgaatgt

SEQ ID NO: 4471 - RNA, 21 nt, synthetic construct
  source 1..21: mol_type = other RNA
cgtctggccaggtgtccttgt

SEQ ID NO: 4472 - RNA, 21 nt, synthetic construct
  source 1..21: mol_type = other RNA
cgtctaacaacagtagtttcc

SEQ ID NO: 4473 - RNA, 20 nt, synthetic construct
  source 1..20: mol_type = other RNA
cgtctaacaacagtagtttc

SEQ ID NO: 4474 - RNA, 20 nt, synthetic construct
  source 1..20: mol_type = other RNA
cgtcgcatggagaccaccgt

SEQ ID NO: 4475 - RNA, 20 nt, synthetic construct
  source 1..20: mol_type = other RNA
cgtccgaaggtttggtacag

SEQ ID NO: 4476 - RNA, 20 nt, synthetic construct
  source 1..20: mol_type = other RNA
cgtcccgcgcaggatccagt

SEQ ID NO: 4477 - RNA, 20 nt, synthetic construct
  source 1..20: mol_type = other RNA
cgtcagcaaacacttggcac

SEQ ID NO: 4478 - RNA, 20 nt, synthetic construct
  source 1..20: mol_type = other RNA
cgtcaatcttctcgaggatt

SEQ ID NO: 4479 - RNA, 20 nt, synthetic construct
  source 1..20: mol_type = other RNA
cgtactgaaggaaagaagtc

SEQ ID NO: 4480 - RNA, 20 nt, synthetic construct
  source 1..20: mol_type = other RNA
cgtaaacaaaggacgtcccg

SEQ ID NO: 4481 - RNA, 20 nt, synthetic construct
  source 1..20: mol_type = other RNA
cggtttctcttccaaaagtg

SEQ ID NO: 4482 - RNA, 20 nt, synthetic construct
  source 1..20: mol_type = other RNA
cggtggggtgaaacccagcc

SEQ ID NO: 4483 - RNA, 20 nt, synthetic construct
  source 1..20: mol_type = other RNA
cggtcggaacggcagacgga

SEQ ID NO: 4484 - RNA, 20 nt, synthetic construct
  source 1..20: mol_type = other RNA
cggtaaaaagggactcaaga

SEQ ID NO: 4485 - RNA, 20 nt, synthetic construct
  source 1..20: mol_type = other RNA
cgggtatattatataagaga

SEQ ID NO: 4486 - RNA, 20 nt, synthetic construct
  source 1..20: mol_type = other RNA
cggggtttttcttgttgaca

SEQ ID NO: 4487 - RNA, 20 nt, synthetic construct
  source 1..20: mol_type = other RNA
cggggagtccgcgtaaagag

SEQ ID NO: 4488 - RNA, 20 nt, synthetic construct
  source 1..20: mol_type = other RNA
cgggctgggtttcaccccac

SEQ ID NO: 4489 - RNA, 21 nt, synthetic construct
  source 1..21: mol_type = other RNA
cgggctgaggcccactcccat

SEQ ID NO: 4490 - RNA, 20 nt, synthetic construct
  source 1..20: mol_type = other RNA
cgggctgaggcccactccca

SEQ ID NO: 4491 - RNA, 20 nt, synthetic construct
  source 1..20: mol_type = other RNA
cgggcaacggggtaaaggtt

SEQ ID NO: 4492 - RNA, 20 nt, synthetic construct
  source 1..20: mol_type = other RNA
cgggaagccttagagtctcc

SEQ ID NO: 4493 - RNA, 20 nt, synthetic construct
  source 1..20: mol_type = other RNA
cggctaggagttccgcagta

SEQ ID NO: 4494 - RNA, 20 nt, synthetic construct
  source 1..20: mol_type = other RNA
cggcgattgagaccttcgtc

SEQ ID NO: 4495 - RNA, 20 nt, synthetic construct
  source 1..20: mol_type = other RNA
cggcagacggagaaggggac

SEQ ID NO: 4496 - RNA, 20 nt, synthetic construct
  source 1..20: mol_type = other RNA
cggacgacccttctcggggt

SEQ ID NO: 4497 - RNA, 20 nt, synthetic construct
  source 1..20: mol_type = other RNA
cggaagtgttgataggatag

SEQ ID NO: 4498 - RNA, 20 nt, synthetic construct
  source 1..20: mol_type = other RNA
cggaacggcagacggagaag

SEQ ID NO: 4499 - RNA, 20 nt, synthetic construct
  source 1..20: mol_type = other RNA
cggaaactactgttgttaga

SEQ ID NO: 4500 - RNA, 20 nt, synthetic construct
  source 1..20: mol_type = other RNA
cggaaaattcctatgggagt

SEQ ID NO: 4501 - RNA, 20 nt, synthetic construct
  source 1..20: mol_type = other RNA
cgcgtgcgtggaaccttttc

SEQ ID NO: 4502 - RNA, 21 nt, synthetic construct
  source 1..21: mol_type = other RNA
cgcgtaaagagaggtgcgccc

SEQ ID NO: 4503 - RNA, 20 nt, synthetic construct
  source 1..20: mol_type = other RNA
cgcgctgatggcccatgacc

SEQ ID NO: 4504 - RNA, 20 nt, synthetic construct
  source 1..20: mol_type = other RNA
cgcctcgcagacgaaggtct

SEQ ID NO: 4505 - RNA, 20 nt, synthetic construct
  source 1..20: mol_type = other RNA
cgcctcctgcctccaccaat

SEQ ID NO: 4506 - RNA, 20 nt, synthetic construct
  source 1..20: mol_type = other RNA
cgcctcagctctgtatcggg

SEQ ID NO: 4507 - RNA, 20 nt, synthetic construct
  source 1..20: mol_type = other RNA
cgccgcgtcgcagaagatct

SEQ ID NO: 4508 - RNA, 20 nt, synthetic construct
  source 1..20: mol_type = other RNA
cgccgacgggacgtaaacaa

SEQ ID NO: 4509 - RNA, 20 nt, synthetic construct
  source 1..20: mol_type = other RNA
cgccccgtggtcggtcggaa

SEQ ID NO: 4510 - RNA, 20 nt, synthetic construct
  source 1..20: mol_type = other RNA
cgccaacaaggtaggagctg

SEQ ID NO: 4511 - RNA, 20 nt, synthetic construct
  source 1..20: mol_type = other RNA
cgcatggagaccaccgtgaa

SEQ ID NO: 4512 - RNA, 20 nt, synthetic construct
  source 1..20: mol_type = other RNA
cgcagtatggatcggcagag

SEQ ID NO: 4513 - RNA, 21 nt, synthetic construct
  source 1..21: mol_type = other RNA
cgcagggtccccaatcctcga

SEQ ID NO: 4514 - RNA, 20 nt, synthetic construct
  source 1..20: mol_type = other RNA
cgcagggtccccaatcctcg

SEQ ID NO: 4515 - RNA, 20 nt, synthetic construct
  source 1..20: mol_type = other RNA
cgcaggattcagcgccgacg

SEQ ID NO: 4516 - RNA, 20 nt, synthetic construct
  source 1..20: mol_type = other RNA
cgcaggataaccacattgtg

SEQ ID NO: 4517 - RNA, 20 nt, synthetic construct
  source 1..20: mol_type = other RNA
cgcagaccaatttatgccta

SEQ ID NO: 4518 - RNA, 20 nt, synthetic construct
  source 1..20: mol_type = other RNA
cgcagaagatctcaatctcg

SEQ ID NO: 4519 - RNA, 20 nt, synthetic construct
  source 1..20: mol_type = other RNA
cgcacggaggccttttgggg

SEQ ID NO: 4520 - RNA, 21 nt, synthetic construct
  source 1..21: mol_type = other RNA
cgcaacccccactggctgggg

SEQ ID NO: 4521 - RNA, 20 nt, synthetic construct
  source 1..20: mol_type = other RNA
cgattggtggaggcaggagg

SEQ ID NO: 4522 - RNA, 20 nt, synthetic construct
  source 1..20: mol_type = other RNA
cgattgagaccttcgtctgc

SEQ ID NO: 4523 - RNA, 20 nt, synthetic construct
  source 1..20: mol_type = other RNA
cgatgtatatttgcgggaga

SEQ ID NO: 4524 - RNA, 20 nt, synthetic construct
  source 1..20: mol_type = other RNA
cgagggagttcttcttctag

SEQ ID NO: 4525 - RNA, 20 nt, synthetic construct
  source 1..20: mol_type = other RNA
cgaggcaggtcccctagaag

SEQ ID NO: 4526 - RNA, 20 nt, synthetic construct
  source 1..20: mol_type = other RNA
cgagcaaaacaagcggctag

SEQ ID NO: 4527 - RNA, 20 nt, synthetic construct
  source 1..20: mol_type = other RNA
cgagaagattgacgataagg

SEQ ID NO: 4528 - RNA, 20 nt, synthetic construct
  source 1..20: mol_type = other RNA
cgagaaagtgaaagcctgct

SEQ ID NO: 4529 - RNA, 20 nt, synthetic construct
  source 1..20: mol_type = other RNA
cgacgtgcagaggtgaagcg

SEQ ID NO: 4530 - RNA, 20 nt, synthetic construct
  source 1..20: mol_type = other RNA
cgacgaggcaggtcccctag

SEQ ID NO: 4531 - RNA, 20 nt, synthetic construct
  source 1..20: mol_type = other RNA
cgaccttgaggcatacttca

SEQ ID NO: 4532 - RNA, 20 nt, synthetic construct
  source 1..20: mol_type = other RNA
cgacccttctcggggtcgct

SEQ ID NO: 4533 - RNA, 20 nt, synthetic construct
  source 1..20: mol_type = other RNA
cgacccttataaagaatttg

SEQ ID NO: 4534 - RNA, 20 nt, synthetic construct
  source 1..20: mol_type = other RNA
cgaccccgagaagggtcgtc

SEQ ID NO: 4535 - RNA, 21 nt, synthetic construct
  source 1..21: mol_type = other RNA
cgaattttggccaagacacac

SEQ ID NO: 4536 - RNA, 20 nt, synthetic construct
  source 1..20: mol_type = other RNA
cgaattttggccaagacaca

SEQ ID NO: 4537 - RNA, 20 nt, synthetic construct
  source 1..20: mol_type = other RNA
cgaagtgcacacggtccggc

SEQ ID NO: 4538 - RNA, 20 nt, synthetic construct
  source 1..20: mol_type = other RNA
cgaaggtttggtacagcaac

SEQ ID NO: 4539 - RNA, 20 nt, synthetic construct
  source 1..20: mol_type = other RNA
ccttttggggtggagccctc

SEQ ID NO: 4540 - RNA, 20 nt, synthetic construct
  source 1..20: mol_type = other RNA
cctttggataaaacctagca

SEQ ID NO: 4541 - RNA, 20 nt, synthetic construct
  source 1..20: mol_type = other RNA
ccttgttgggattgaagtcc

SEQ ID NO: 4542 - RNA, 20 nt, synthetic construct
  source 1..20: mol_type = other RNA
ccttgggtggctttggggca

SEQ ID NO: 4543 - RNA, 20 nt, synthetic construct
  source 1..20: mol_type = other RNA
ccttggactcataaggtggg

SEQ ID NO: 4544 - RNA, 20 nt, synthetic construct
  source 1..20: mol_type = other RNA
ccttgatagtccagaagaac

SEQ ID NO: 4545 - RNA, 20 nt, synthetic construct
  source 1..20: mol_type = other RNA
ccttcgtctgcgaggcgagg

SEQ ID NO: 4546 - RNA, 20 nt, synthetic construct
  source 1..20: mol_type = other RNA
ccttcctgtctggcgattgg

SEQ ID NO: 4547 - RNA, 20 nt, synthetic construct
  source 1..20: mol_type = other RNA
ccttccatagagtgtgtaaa

SEQ ID NO: 4548 - RNA, 20 nt, synthetic construct
  source 1..20: mol_type = other RNA
ccttcagtacgagatcttct

SEQ ID NO: 4549 - RNA, 21 nt, synthetic construct
  source 1..21: mol_type = other RNA
ccttattatccagaacatcta

SEQ ID NO: 4550 - RNA, 20 nt, synthetic construct
  source 1..20: mol_type = other RNA
ccttatcgtcaatcttctcg

SEQ ID NO: 4551 - RNA, 20 nt, synthetic construct
  source 1..20: mol_type = other RNA
cctgttaataggaagttttc

SEQ ID NO: 4552 - RNA, 20 nt, synthetic construct
  source 1..20: mol_type = other RNA
cctgtctttaatcctcattg

SEQ ID NO: 4553 - RNA, 20 nt, synthetic construct
  source 1..20: mol_type = other RNA
cctgtctggcgattggtgga

SEQ ID NO: 4554 - RNA, 20 nt, synthetic construct
  source 1..20: mol_type = other RNA
cctgggtgggtgttaatttg

SEQ ID NO: 4555 - RNA, 20 nt, synthetic construct
  source 1..20: mol_type = other RNA
cctggccgttgccgggcaac

SEQ ID NO: 4556 - RNA, 20 nt, synthetic construct
  source 1..20: mol_type = other RNA
cctggccagacgccaacaag

SEQ ID NO: 4557 - RNA, 20 nt, synthetic construct
  source 1..20: mol_type = other RNA
cctggaattagaggacaaac

SEQ ID NO: 4558 - RNA, 20 nt, synthetic construct
  source 1..20: mol_type = other RNA
cctgctggtggctccagttc

SEQ ID NO: 4559 - RNA, 20 nt, synthetic construct
  source 1..20: mol_type = other RNA
cctgctgcgagcaaaacaag

SEQ ID NO: 4560 - RNA, 20 nt, synthetic construct
  source 1..20: mol_type = other RNA
cctgcgttaatgcccttgta

SEQ ID NO: 4561 - RNA, 20 nt, synthetic construct
  source 1..20: mol_type = other RNA
cctgcggacgacccttctcg

SEQ ID NO: 4562 - RNA, 21 nt, synthetic construct
  source 1..21: mol_type = other RNA
cctgcctcgtcgtctaacaac

SEQ ID NO: 4563 - RNA, 20 nt, synthetic construct
  source 1..20: mol_type = other RNA
cctgcctcgtcgtctaacaa

SEQ ID NO: 4564 - RNA, 20 nt, synthetic construct
  source 1..20: mol_type = other RNA
cctgcatgactactgctcaa

SEQ ID NO: 4565 - RNA, 20 nt, synthetic construct
  source 1..20: mol_type = other RNA
cctgagggctccaccccaaa

SEQ ID NO: 4566 - RNA, 20 nt, synthetic construct
  source 1..20: mol_type = other RNA
cctgaggatgagtgtttctc

SEQ ID NO: 4567 - RNA, 20 nt, synthetic construct
  source 1..20: mol_type = other RNA
cctgaactttaggcccatat

SEQ ID NO: 4568 - RNA, 20 nt, synthetic construct
  source 1..20: mol_type = other RNA
cctgaactggagccaccagc

SEQ ID NO: 4569 - RNA, 20 nt, synthetic construct
  source 1..20: mol_type = other RNA
cctctgggattctttcccga

SEQ ID NO: 4570 - RNA, 20 nt, synthetic construct
  source 1..20: mol_type = other RNA
cctctcactctgggatcttg

SEQ ID NO: 4571 - RNA, 20 nt, synthetic construct
  source 1..20: mol_type = other RNA
cctctatgtatccctcctgt

SEQ ID NO: 4572 - RNA, 21 nt, synthetic construct
  source 1..21: mol_type = other RNA
cctcgcctcgcagacgaaggt

SEQ ID NO: 4573 - RNA, 20 nt, synthetic construct
  source 1..20: mol_type = other RNA
cctcgagaagattgacgata

SEQ ID NO: 4574 - RNA, 20 nt, synthetic construct
  source 1..20: mol_type = other RNA
cctcctagtacaaagacctt

SEQ ID NO: 4575 - RNA, 20 nt, synthetic construct
  source 1..20: mol_type = other RNA
cctcccagtctttaaacaaa

SEQ ID NO: 4576 - RNA, 20 nt, synthetic construct
  source 1..20: mol_type = other RNA
cctccagcttatagaccacc

SEQ ID NO: 4577 - RNA, 20 nt, synthetic construct
  source 1..20: mol_type = other RNA
cctccaagctgtgccttggg

SEQ ID NO: 4578 - RNA, 20 nt, synthetic construct
  source 1..20: mol_type = other RNA
cctcacaataccgcagagtc

SEQ ID NO: 4579 - RNA, 20 nt, synthetic construct
  source 1..20: mol_type = other RNA
cctcaatgttagtattcctt

SEQ ID NO: 4580 - RNA, 20 nt, synthetic construct
  source 1..20: mol_type = other RNA
cctatcctatcaacacttcc

SEQ ID NO: 4581 - RNA, 20 nt, synthetic construct
  source 1..20: mol_type = other RNA
cctagaaaattgagagaagt

SEQ ID NO: 4582 - RNA, 20 nt, synthetic construct
  source 1..20: mol_type = other RNA
cctacgaaccactgaacaaa

SEQ ID NO: 4583 - RNA, 20 nt, synthetic construct
  source 1..20: mol_type = other RNA
cctacagcctcctagtacaa

SEQ ID NO: 4584 - RNA, 20 nt, synthetic construct
  source 1..20: mol_type = other RNA
cctaatatacatttacacca

SEQ ID NO: 4585 - RNA, 20 nt, synthetic construct
  source 1..20: mol_type = other RNA
cctaacaaaacaaagagatg

SEQ ID NO: 4586 - RNA, 20 nt, synthetic construct
  source 1..20: mol_type = other RNA
ccgtttgtcctctaattcca

SEQ ID NO: 4587 - RNA, 21 nt, synthetic construct
  source 1..21: mol_type = other RNA
ccgtttctcctggctcagttt

SEQ ID NO: 4588 - RNA, 20 nt, synthetic construct
  source 1..20: mol_type = other RNA
ccgttgccgggcaacggggt

SEQ ID NO: 4589 - RNA, 21 nt, synthetic construct
  source 1..21: mol_type = other RNA
ccgtgtgtcttggccaaaatt

SEQ ID NO: 4590 - RNA, 20 nt, synthetic construct
  source 1..20: mol_type = other RNA
ccgtggtcggtcggaacggc

SEQ ID NO: 4591 - RNA, 20 nt, synthetic construct
  source 1..20: mol_type = other RNA
ccgtgcggtggggtgaaacc

SEQ ID NO: 4592 - RNA, 20 nt, synthetic construct
  source 1..20: mol_type = other RNA
ccgtcggcgctgaatcctgc

SEQ ID NO: 4593 - RNA, 20 nt, synthetic construct
  source 1..20: mol_type = other RNA
ccggaagtgttgataggata

SEQ ID NO: 4594 - RNA, 20 nt, synthetic construct
  source 1..20: mol_type = other RNA
ccgcttgttttgctcgcagc

SEQ ID NO: 4595 - RNA, 20 nt, synthetic construct
  source 1..20: mol_type = other RNA
ccgctgtctccacctttgag

SEQ ID NO: 4596 - RNA, 20 nt, synthetic construct
  source 1..20: mol_type = other RNA
ccgcgcaggatccagttggc

SEQ ID NO: 4597 - RNA, 20 nt, synthetic construct
  source 1..20: mol_type = other RNA
ccgccttccatagagtgtgt

SEQ ID NO: 4598 - RNA, 20 nt, synthetic construct
  source 1..20: mol_type = other RNA
ccgcctcagctctgtatcgg

SEQ ID NO: 4599 - RNA, 20 nt, synthetic construct
  source 1..20: mol_type = other RNA
ccgcaggattcagcgccgac

SEQ ID NO: 4600 - RNA, 20 nt, synthetic construct
  source 1..20: mol_type = other RNA
ccgaccttgaggcatacttc

SEQ ID NO: 4601 - RNA, 20 nt, synthetic construct
  source 1..20: mol_type = other RNA
ccgaaggtttggtacagcaa

SEQ ID NO: 4602 - RNA, 21 nt, synthetic construct
  source 1..21: mol_type = other RNA
ccgaaaaggttccacgcacgc

SEQ ID NO: 4603 - RNA, 20 nt, synthetic construct
  source 1..20: mol_type = other RNA
ccgaaaaggttccacgcacg

SEQ ID NO: 4604 - RNA, 20 nt, synthetic construct
  source 1..20: mol_type = other RNA
cccttctcgtgttacaggcg

SEQ ID NO: 4605 - RNA, 20 nt, synthetic construct
  source 1..20: mol_type = other RNA
cccttctccgtctgccgttc

SEQ ID NO: 4606 - RNA, 20 nt, synthetic construct
  source 1..20: mol_type = other RNA
cccttatcgtcaatcttctc

SEQ ID NO: 4607 - RNA, 20 nt, synthetic construct
  source 1..20: mol_type = other RNA
ccctgctggtggctccagtt

SEQ ID NO: 4608 - RNA, 20 nt, synthetic construct
  source 1..20: mol_type = other RNA
ccctatcctatcaacacttc

SEQ ID NO: 4609 - RNA, 20 nt, synthetic construct
  source 1..20: mol_type = other RNA
ccctagaagaagaactccct

SEQ ID NO: 4610 - RNA, 20 nt, synthetic construct
  source 1..20: mol_type = other RNA
ccctaacaaaacaaagagat

SEQ ID NO: 4611 - RNA, 20 nt, synthetic construct
  source 1..20: mol_type = other RNA
cccgtttgtcctctaattcc

SEQ ID NO: 4612 - RNA, 20 nt, synthetic construct
  source 1..20: mol_type = other RNA
cccgttgcccggcaacggcc

SEQ ID NO: 4613 - RNA, 20 nt, synthetic construct
  source 1..20: mol_type = other RNA
cccgtggtcggtcggaacgg

SEQ ID NO: 4614 - RNA, 20 nt, synthetic construct
  source 1..20: mol_type = other RNA
cccgtctgtgccttctcatc

SEQ ID NO: 4615 - RNA, 20 nt, synthetic construct
  source 1..20: mol_type = other RNA
cccgtcggcgctgaatcctg

SEQ ID NO: 4616 - RNA, 20 nt, synthetic construct
  source 1..20: mol_type = other RNA
cccggcaacggccaggtctg

SEQ ID NO: 4617 - RNA, 20 nt, synthetic construct
  source 1..20: mol_type = other RNA
cccgctgtctccacctttga

SEQ ID NO: 4618 - RNA, 20 nt, synthetic construct
  source 1..20: mol_type = other RNA
cccgcgcaggatccagttgg

SEQ ID NO: 4619 - RNA, 20 nt, synthetic construct
  source 1..20: mol_type = other RNA
cccgccttccatagagtgtg

SEQ ID NO: 4620 - RNA, 20 nt, synthetic construct
  source 1..20: mol_type = other RNA
cccgcctgtaacacgagaag

SEQ ID NO: 4621 - RNA, 20 nt, synthetic construct
  source 1..20: mol_type = other RNA
cccgagattgagatcttctg

SEQ ID NO: 4622 - RNA, 20 nt, synthetic construct
  source 1..20: mol_type = other RNA
cccgagaagggtcgtccgca

SEQ ID NO: 4623 - RNA, 20 nt, synthetic construct
  source 1..20: mol_type = other RNA
cccgaccaccagttggatcc

SEQ ID NO: 4624 - RNA, 20 nt, synthetic construct
  source 1..20: mol_type = other RNA
ccccttctcgtgttacaggc

SEQ ID NO: 4625 - RNA, 20 nt, synthetic construct
  source 1..20: mol_type = other RNA
ccccgttgcccggcaacggc

SEQ ID NO: 4626 - RNA, 20 nt, synthetic construct
  source 1..20: mol_type = other RNA
ccccgctgtctccacctttg

SEQ ID NO: 4627 - RNA, 20 nt, synthetic construct
  source 1..20: mol_type = other RNA
ccccgcctgtaacacgagaa

SEQ ID NO: 4628 - RNA, 20 nt, synthetic construct
  source 1..20: mol_type = other RNA
ccccgagaagggtcgtccgc

SEQ ID NO: 4629 - RNA, 20 nt, synthetic construct
  source 1..20: mol_type = other RNA
ccccccagcaaagaattgct

SEQ ID NO: 4630 - RNA, 20 nt, synthetic construct
  source 1..20: mol_type = other RNA
ccccaccttatgagtccaag

SEQ ID NO: 4631 - RNA, 21 nt, synthetic construct
  source 1..21: mol_type = other RNA
ccccaccgcacggaggccttt

SEQ ID NO: 4632 - RNA, 20 nt, synthetic construct
  source 1..20: mol_type = other RNA
ccccaactcctcccagtctt

SEQ ID NO: 4633 - RNA, 20 nt, synthetic construct
  source 1..20: mol_type = other RNA
ccccaaagccacccaaggca

SEQ ID NO: 4634 - RNA, 21 nt, synthetic construct
  source 1..21: mol_type = other RNA
ccccaaaaggcctccgtgcgg

SEQ ID NO: 4635 - RNA, 20 nt, synthetic construct
  source 1..20: mol_type = other RNA
cccatcatcctgggctttcg

SEQ ID NO: 4636 - RNA, 20 nt, synthetic construct
  source 1..20: mol_type = other RNA
cccagaggattgctggtgga

SEQ ID NO: 4637 - RNA, 20 nt, synthetic construct
  source 1..20: mol_type = other RNA
cccacttacagttaatgaga

SEQ ID NO: 4638 - RNA, 20 nt, synthetic construct
  source 1..20: mol_type = other RNA
cccaccgcacggaggccttt

SEQ ID NO: 4639 - RNA, 20 nt, synthetic construct
  source 1..20: mol_type = other RNA
cccaactcctcccagtcttt

SEQ ID NO: 4640 - RNA, 20 nt, synthetic construct
  source 1..20: mol_type = other RNA
cccaacctccaatcactcac

SEQ ID NO: 4641 - RNA, 20 nt, synthetic construct
  source 1..20: mol_type = other RNA
cccaaagccacccaaggcac

SEQ ID NO: 4642 - RNA, 20 nt, synthetic construct
  source 1..20: mol_type = other RNA
cccaaaaggcctccgtgcgg

SEQ ID NO: 4643 - RNA, 20 nt, synthetic construct
  source 1..20: mol_type = other RNA
ccatttgttcagtggttcgt

SEQ ID NO: 4644 - RNA, 20 nt, synthetic construct
  source 1..20: mol_type = other RNA
ccatggctgctaggctgtgc

SEQ ID NO: 4645 - RNA, 20 nt, synthetic construct
  source 1..20: mol_type = other RNA
ccatggatacgatgtatatt

SEQ ID NO: 4646 - RNA, 20 nt, synthetic construct
  source 1..20: mol_type = other RNA
ccatgcgacgtgcagaggtg

SEQ ID NO: 4647 - RNA, 20 nt, synthetic construct
  source 1..20: mol_type = other RNA
ccatgcaactttttcacctc

SEQ ID NO: 4648 - RNA, 20 nt, synthetic construct
  source 1..20: mol_type = other RNA
ccatcatcctgggctttcgg

SEQ ID NO: 4649 - RNA, 20 nt, synthetic construct
  source 1..20: mol_type = other RNA
ccatataactgaaagccaaa

SEQ ID NO: 4650 - RNA, 21 nt, synthetic construct
  source 1..21: mol_type = other RNA
ccatagagtgtgtaaatagtg

SEQ ID NO: 4651 - RNA, 20 nt, synthetic construct
  source 1..20: mol_type = other RNA
ccatactgcactcaggcaag

SEQ ID NO: 4652 - RNA, 20 nt, synthetic construct
  source 1..20: mol_type = other RNA
ccagttggatccagccttca

SEQ ID NO: 4653 - RNA, 20 nt, synthetic construct
  source 1..20: mol_type = other RNA
ccagtgggggttgcgtcagc

SEQ ID NO: 4654 - RNA, 20 nt, synthetic construct
  source 1..20: mol_type = other RNA
ccaggtgtccttgttgggat

SEQ ID NO: 4655 - RNA, 20 nt, synthetic construct
  source 1..20: mol_type = other RNA
ccaggtctgtgccaagtgtt

SEQ ID NO: 4656 - RNA, 21 nt, synthetic construct
  source 1..21: mol_type = other RNA
ccaggatgatgggatgggaat

SEQ ID NO: 4657 - RNA, 20 nt, synthetic construct
  source 1..20: mol_type = other RNA
ccagcttatagaccaccaaa

SEQ ID NO: 4658 - RNA, 20 nt, synthetic construct
  source 1..20: mol_type = other RNA
ccagccttcagagcaaacac

SEQ ID NO: 4659 - RNA, 20 nt, synthetic construct
  source 1..20: mol_type = other RNA
ccagccagtgggggttgcgt

SEQ ID NO: 4660 - RNA, 21 nt, synthetic construct
  source 1..21: mol_type = other RNA
ccagcatctagagacctagta

SEQ ID NO: 4661 - RNA, 20 nt, synthetic construct
  source 1..20: mol_type = other RNA
ccagattgggacttcaatcc

SEQ ID NO: 4662 - RNA, 20 nt, synthetic construct
  source 1..20: mol_type = other RNA
ccagaggattgctggtggaa

SEQ ID NO: 4663 - RNA, 20 nt, synthetic construct
  source 1..20: mol_type = other RNA
ccagacgccaacaaggtagg

SEQ ID NO: 4664 - RNA, 20 nt, synthetic construct
  source 1..20: mol_type = other RNA
ccacttacagttaatgagaa

SEQ ID NO: 4665 - RNA, 20 nt, synthetic construct
  source 1..20: mol_type = other RNA
ccactgcatggcctgaggat

SEQ ID NO: 4666 - RNA, 20 nt, synthetic construct
  source 1..20: mol_type = other RNA
ccaccgcacggaggcctttt

SEQ ID NO: 4667 - RNA, 20 nt, synthetic construct
  source 1..20: mol_type = other RNA
ccacattgtgtaaatggggc

SEQ ID NO: 4668 - RNA, 20 nt, synthetic construct
  source 1..20: mol_type = other RNA
ccacatcatccatataactg

SEQ ID NO: 4669 - RNA, 21 nt, synthetic construct
  source 1..21: mol_type = other RNA
ccacaattcgttgacatactt

SEQ ID NO: 4670 - RNA, 21 nt, synthetic construct
  source 1..21: mol_type = other RNA
ccaatgaggattaaagacagg

SEQ ID NO: 4671 - RNA, 20 nt, synthetic construct
  source 1..20: mol_type = other RNA
ccaatcgccagacaggaagg

SEQ ID NO: 4672 - RNA, 20 nt, synthetic construct
  source 1..20: mol_type = other RNA
ccaatcaataggcctgttaa

SEQ ID NO: 4673 - RNA, 20 nt, synthetic construct
  source 1..20: mol_type = other RNA
ccaataccacatcatccata

SEQ ID NO: 4674 - RNA, 20 nt, synthetic construct
  source 1..20: mol_type = other RNA
ccaagtctgtacagcatctt

SEQ ID NO: 4675 - RNA, 20 nt, synthetic construct
  source 1..20: mol_type = other RNA
ccaagaatatggtgacccac

SEQ ID NO: 4676 - RNA, 20 nt, synthetic construct
  source 1..20: mol_type = other RNA
ccaacaagaagatgaggcat

SEQ ID NO: 4677 - RNA, 20 nt, synthetic construct
  source 1..20: mol_type = other RNA
ccaaatatttaccattggat

SEQ ID NO: 4678 - RNA, 20 nt, synthetic construct
  source 1..20: mol_type = other RNA
ccaaactctgcaagatccca

SEQ ID NO: 4679 - RNA, 20 nt, synthetic construct
  source 1..20: mol_type = other RNA
ccaaaccttcggacggaaat

SEQ ID NO: 4680 - RNA, 20 nt, synthetic construct
  source 1..20: mol_type = other RNA
ccaaaaggcctccgtgcggt

SEQ ID NO: 4681 - RNA, 20 nt, synthetic construct
  source 1..20: mol_type = other RNA
ccaaaagacccacaattcgt

SEQ ID NO: 4682 - RNA, 20 nt, synthetic construct
  source 1..20: mol_type = other RNA
catttgttcagtggttcgta

SEQ ID NO: 4683 - RNA, 20 nt, synthetic construct
  source 1..20: mol_type = other RNA
catttggtggtctataagct

SEQ ID NO: 4684 - RNA, 20 nt, synthetic construct
  source 1..20: mol_type = other RNA
catttcttgtctcacttttg

SEQ ID NO: 4685 - RNA, 20 nt, synthetic construct
  source 1..20: mol_type = other RNA
catttacaccaagacattat

SEQ ID NO: 4686 - RNA, 20 nt, synthetic construct
  source 1..20: mol_type = other RNA
catttaaaccctaacaaaac

SEQ ID NO: 4687 - RNA, 20 nt, synthetic construct
  source 1..20: mol_type = other RNA
cattgttcacctcaccatac

SEQ ID NO: 4688 - RNA, 20 nt, synthetic construct
  source 1..20: mol_type = other RNA
cattgtgtaaatggggcagc

SEQ ID NO: 4689 - RNA, 20 nt, synthetic construct
  source 1..20: mol_type = other RNA
cattggaagttatgggtcct

SEQ ID NO: 4690 - RNA, 21 nt, synthetic construct
  source 1..21: mol_type = other RNA
cattggaaaacaccatctttt

SEQ ID NO: 4691 - RNA, 20 nt, synthetic construct
  source 1..20: mol_type = other RNA
cattgaggttcccgagattg

SEQ ID NO: 4692 - RNA, 20 nt, synthetic construct
  source 1..20: mol_type = other RNA
cattcggtgggcgttcacgg

SEQ ID NO: 4693 - RNA, 20 nt, synthetic construct
  source 1..20: mol_type = other RNA
cattagttccccccagcaaa

SEQ ID NO: 4694 - RNA, 20 nt, synthetic construct
  source 1..20: mol_type = other RNA
catgttcagcgcagggtccc

SEQ ID NO: 4695 - RNA, 20 nt, synthetic construct
  source 1..20: mol_type = other RNA
catggtgctggtgcgcagac

SEQ ID NO: 4696 - RNA, 21 nt, synthetic construct
  source 1..21: mol_type = other RNA
catggtcccgtgctggtggtt

SEQ ID NO: 4697 - RNA, 20 nt, synthetic construct
  source 1..20: mol_type = other RNA
catggtcccgtgctggtggt

SEQ ID NO: 4698 - RNA, 20 nt, synthetic construct
  source 1..20: mol_type = other RNA
catggacatcgacccttata

SEQ ID NO: 4699 - RNA, 21 nt, synthetic construct
  source 1..21: mol_type = other RNA
catgctgtagatcttgttccc

SEQ ID NO: 4700 - RNA, 20 nt, synthetic construct
  source 1..20: mol_type = other RNA
catgctgtagatcttgttcc

SEQ ID NO: 4701 - RNA, 20 nt, synthetic construct
  source 1..20: mol_type = other RNA
catgcgacgtgcagaggtga

SEQ ID NO: 4702 - RNA, 20 nt, synthetic construct
  source 1..20: mol_type = other RNA
catgccccaaagccacccaa

SEQ ID NO: 4703 - RNA, 20 nt, synthetic construct
  source 1..20: mol_type = other RNA
catgcatacaagggcattaa

SEQ ID NO: 4704 - RNA, 21 nt, synthetic construct
  source 1..21: mol_type = other RNA
catgaccaagccccagccagt

SEQ ID NO: 4705 - RNA, 20 nt, synthetic construct
  source 1..20: mol_type = other RNA
catgaccaagccccagccag

SEQ ID NO: 4706 - RNA, 20 nt, synthetic construct
  source 1..20: mol_type = other RNA
catcttgagtccctttttac

SEQ ID NO: 4707 - RNA, 20 nt, synthetic construct
  source 1..20: mol_type = other RNA
catcttcttgttggttcttc

SEQ ID NO: 4708 - RNA, 20 nt, synthetic construct
  source 1..20: mol_type = other RNA
catcttcctcttcatcctgc

SEQ ID NO: 4709 - RNA, 20 nt, synthetic construct
  source 1..20: mol_type = other RNA
catcgtatccatggctgcta

SEQ ID NO: 4710 - RNA, 20 nt, synthetic construct
  source 1..20: mol_type = other RNA
catccatataactgaaagcc

SEQ ID NO: 4711 - RNA, 20 nt, synthetic construct
  source 1..20: mol_type = other RNA
catccagcgataaccaggac

SEQ ID NO: 4712 - RNA, 20 nt, synthetic construct
  source 1..20: mol_type = other RNA
catcatcctgggctttcgga

SEQ ID NO: 4713 - RNA, 20 nt, synthetic construct
  source 1..20: mol_type = other RNA
catattagtgttgacataac

SEQ ID NO: 4714 - RNA, 21 nt, synthetic construct
  source 1..21: mol_type = other RNA
cataggaattttccgaaagcc

SEQ ID NO: 4715 - RNA, 20 nt, synthetic construct
  source 1..20: mol_type = other RNA
cataggaattttccgaaagc

SEQ ID NO: 4716 - RNA, 20 nt, synthetic construct
  source 1..20: mol_type = other RNA
catagcagcaggatgaagag

SEQ ID NO: 4717 - RNA, 20 nt, synthetic construct
  source 1..20: mol_type = other RNA
catagaggttccttgagcag

SEQ ID NO: 4718 - RNA, 20 nt, synthetic construct
  source 1..20: mol_type = other RNA
catactgcggaactcctagc

SEQ ID NO: 4719 - RNA, 20 nt, synthetic construct
  source 1..20: mol_type = other RNA
catactacaaactttgccag

SEQ ID NO: 4720 - RNA, 20 nt, synthetic construct
  source 1..20: mol_type = other RNA
cataccttgatagtccagaa

SEQ ID NO: 4721 - RNA, 20 nt, synthetic construct
  source 1..20: mol_type = other RNA
catacaagggcattaacgca

SEQ ID NO: 4722 - RNA, 20 nt, synthetic construct
  source 1..20: mol_type = other RNA
cataaggtggggaactttac

SEQ ID NO: 4723 - RNA, 20 nt, synthetic construct
  source 1..20: mol_type = other RNA
cataacccataaaattcaga

SEQ ID NO: 4724 - RNA, 20 nt, synthetic construct
  source 1..20: mol_type = other RNA
cataaattggtctgcgcacc

SEQ ID NO: 4725 - RNA, 21 nt, synthetic construct
  source 1..21: mol_type = other RNA
cagtttgtaggcccacttaca

SEQ ID NO: 4726 - RNA, 20 nt, synthetic construct
  source 1..20: mol_type = other RNA
cagttggcagcacagcctag

SEQ ID NO: 4727 - RNA, 20 nt, synthetic construct
  source 1..20: mol_type = other RNA
cagttggatccagccttcag

SEQ ID NO: 4728 - RNA, 20 nt, synthetic construct
  source 1..20: mol_type = other RNA
cagttatgtcaacactaata

SEQ ID NO: 4729 - RNA, 21 nt, synthetic construct
  source 1..21: mol_type = other RNA
cagttaatgagaaaagaagat

SEQ ID NO: 4730 - RNA, 20 nt, synthetic construct
  source 1..20: mol_type = other RNA
cagtctttgaagtatgcctc

SEQ ID NO: 4731 - RNA, 20 nt, synthetic construct
  source 1..20: mol_type = other RNA
cagtatggtgaggtgaacaa

SEQ ID NO: 4732 - RNA, 21 nt, synthetic construct
  source 1..21: mol_type = other RNA
cagtagctccaaattctttat

SEQ ID NO: 4733 - RNA, 20 nt, synthetic construct
  source 1..20: mol_type = other RNA
cagtagctccaaattcttta

SEQ ID NO: 4734 - RNA, 21 nt, synthetic construct
  source 1..21: mol_type = other RNA
cagtagaagaataaagaccag

SEQ ID NO: 4735 - RNA, 20 nt, synthetic construct
  source 1..20: mol_type = other RNA
cagtaaagttccccacctta

SEQ ID NO: 4736 - RNA, 20 nt, synthetic construct
  source 1..20: mol_type = other RNA
caggtgtccttgttgggatt

SEQ ID NO: 4737 - RNA, 20 nt, synthetic construct
  source 1..20: mol_type = other RNA
caggtgcaatttccgtccga

SEQ ID NO: 4738 - RNA, 20 nt, synthetic construct
  source 1..20: mol_type = other RNA
caggtattgtttacacagaa

SEQ ID NO: 4739 - RNA, 20 nt, synthetic construct
  source 1..20: mol_type = other RNA
caggtacagtagaagaataa

SEQ ID NO: 4740 - RNA, 20 nt, synthetic construct
  source 1..20: mol_type = other RNA
cagggtccccaatcctcgag

SEQ ID NO: 4741 - RNA, 20 nt, synthetic construct
  source 1..20: mol_type = other RNA
caggatgaagaggaagatga

SEQ ID NO: 4742 - RNA, 20 nt, synthetic construct
  source 1..20: mol_type = other RNA
caggatccagttggcagcac

SEQ ID NO: 4743 - RNA, 20 nt, synthetic construct
  source 1..20: mol_type = other RNA
caggaggttggtgagtgatt

SEQ ID NO: 4744 - RNA, 20 nt, synthetic construct
  source 1..20: mol_type = other RNA
caggaggcggatttgctggc

SEQ ID NO: 4745 - RNA, 20 nt, synthetic construct
  source 1..20: mol_type = other RNA
caggagactctaaggcttcc

SEQ ID NO: 4746 - RNA, 20 nt, synthetic construct
  source 1..20: mol_type = other RNA
caggacaagttggaggacag

SEQ ID NO: 4747 - RNA, 20 nt, synthetic construct
  source 1..20: mol_type = other RNA
cagcttggaggcttgaacag

SEQ ID NO: 4748 - RNA, 21 nt, synthetic construct
  source 1..21: mol_type = other RNA
cagctctgtatcgggaagcct

SEQ ID NO: 4749 - RNA, 20 nt, synthetic construct
  source 1..20: mol_type = other RNA
cagcggtaaaaagggactca

SEQ ID NO: 4750 - RNA, 20 nt, synthetic construct
  source 1..20: mol_type = other RNA
cagcgccgacgggacgtaaa

SEQ ID NO: 4751 - RNA, 20 nt, synthetic construct
  source 1..20: mol_type = other RNA
cagcgataaccaggacaagt

SEQ ID NO: 4752 - RNA, 21 nt, synthetic construct
  source 1..21: mol_type = other RNA
cagcctcctagtacaaagacc

SEQ ID NO: 4753 - RNA, 20 nt, synthetic construct
  source 1..20: mol_type = other RNA
cagcctagcagccatggata

SEQ ID NO: 4754 - RNA, 20 nt, synthetic construct
  source 1..20: mol_type = other RNA
cagccagtgggggttgcgtc

SEQ ID NO: 4755 - RNA, 20 nt, synthetic construct
  source 1..20: mol_type = other RNA
cagcatggggcagaatcttt

SEQ ID NO: 4756 - RNA, 20 nt, synthetic construct
  source 1..20: mol_type = other RNA
cagcaggatgaagaggaaga

SEQ ID NO: 4757 - RNA, 20 nt, synthetic construct
  source 1..20: mol_type = other RNA
cagcacagcctagcagccat

SEQ ID NO: 4758 - RNA, 20 nt, synthetic construct
  source 1..20: mol_type = other RNA
cagcaacaggagggatacat

SEQ ID NO: 4759 - RNA, 20 nt, synthetic construct
  source 1..20: mol_type = other RNA
cagcaaagaattgcttgcct

SEQ ID NO: 4760 - RNA, 20 nt, synthetic construct
  source 1..20: mol_type = other RNA
cagatgagaaggcacagacg

SEQ ID NO: 4761 - RNA, 20 nt, synthetic construct
  source 1..20: mol_type = other RNA
cagagtttggtgaaaggttg

SEQ ID NO: 4762 - RNA, 20 nt, synthetic construct
  source 1..20: mol_type = other RNA
cagagctgaggcggtatcta

SEQ ID NO: 4763 - RNA, 20 nt, synthetic construct
  source 1..20: mol_type = other RNA
cagagcaaacacagcaaatc

SEQ ID NO: 4764 - RNA, 20 nt, synthetic construct
  source 1..20: mol_type = other RNA
cagacggggagtccgcgtaa

SEQ ID NO: 4765 - RNA, 20 nt, synthetic construct
  source 1..20: mol_type = other RNA
cagacggagaaggggacgag

SEQ ID NO: 4766 - RNA, 20 nt, synthetic construct
  source 1..20: mol_type = other RNA
cagacgaaggtctcaatcgc

SEQ ID NO: 4767 - RNA, 20 nt, synthetic construct
  source 1..20: mol_type = other RNA
cagacctggccgttgccggg

SEQ ID NO: 4768 - RNA, 20 nt, synthetic construct
  source 1..20: mol_type = other RNA
cagacctgctgcgagcaaaa

SEQ ID NO: 4769 - RNA, 20 nt, synthetic construct
  source 1..20: mol_type = other RNA
cagacacatccagcgataac

SEQ ID NO: 4770 - RNA, 20 nt, synthetic construct
  source 1..20: mol_type = other RNA
cagaagaaccaacaagaaga

SEQ ID NO: 4771 - RNA, 20 nt, synthetic construct
  source 1..20: mol_type = other RNA
cactttctcgccaacttaca

SEQ ID NO: 4772 - RNA, 21 nt, synthetic construct
  source 1..21: mol_type = other RNA
cacttacagttaatgagaaaa

SEQ ID NO: 4773 - RNA, 20 nt, synthetic construct
  source 1..20: mol_type = other RNA
cacttacagttaatgagaaa

SEQ ID NO: 4774 - RNA, 21 nt, synthetic construct
  source 1..21: mol_type = other RNA
cactgtttggctttcagttat

SEQ ID NO: 4775 - RNA, 20 nt, synthetic construct
  source 1..20: mol_type = other RNA
cactggctggggcttggtca

SEQ ID NO: 4776 - RNA, 20 nt, synthetic construct
  source 1..20: mol_type = other RNA
cactgaacaaatggcactag

SEQ ID NO: 4777 - RNA, 20 nt, synthetic construct
  source 1..20: mol_type = other RNA
cactcccataggaattttcc

SEQ ID NO: 4778 - RNA, 20 nt, synthetic construct
  source 1..20: mol_type = other RNA
cactcaggcaagcaattctt

SEQ ID NO: 4779 - RNA, 20 nt, synthetic construct
  source 1..20: mol_type = other RNA
cactatttacacactctatg

SEQ ID NO: 4780 - RNA, 20 nt, synthetic construct
  source 1..20: mol_type = other RNA
cactagtaaactgagccagg

SEQ ID NO: 4781 - RNA, 20 nt, synthetic construct
  source 1..20: mol_type = other RNA
cacggtccggcagatgagaa

SEQ ID NO: 4782 - RNA, 20 nt, synthetic construct
  source 1..20: mol_type = other RNA
cacggaggccttttggggtg

SEQ ID NO: 4783 - RNA, 20 nt, synthetic construct
  source 1..20: mol_type = other RNA
cacctggccagacgccaaca

SEQ ID NO: 4784 - RNA, 20 nt, synthetic construct
  source 1..20: mol_type = other RNA
cacctctgcacgtcgcatgg

SEQ ID NO: 4785 - RNA, 20 nt, synthetic construct
  source 1..20: mol_type = other RNA
cacctcaccatactgcactc

SEQ ID NO: 4786 - RNA, 20 nt, synthetic construct
  source 1..20: mol_type = other RNA
caccgcacggaggccttttg

SEQ ID NO: 4787 - RNA, 20 nt, synthetic construct
  source 1..20: mol_type = other RNA
caccccaaaaggcctccgtg

SEQ ID NO: 4788 - RNA, 20 nt, synthetic construct
  source 1..20: mol_type = other RNA
cacccaaggcacagcttgga

SEQ ID NO: 4789 - RNA, 20 nt, synthetic construct
  source 1..20: mol_type = other RNA
caccatactgcactcaggca

SEQ ID NO: 4790 - RNA, 20 nt, synthetic construct
  source 1..20: mol_type = other RNA
caccagttggatccagcctt

SEQ ID NO: 4791 - RNA, 20 nt, synthetic construct
  source 1..20: mol_type = other RNA
caccagcacgggaccatgcc

SEQ ID NO: 4792 - RNA, 20 nt, synthetic construct
  source 1..20: mol_type = other RNA
caccaatcgccagacaggaa

SEQ ID NO: 4793 - RNA, 20 nt, synthetic construct
  source 1..20: mol_type = other RNA
caccaaactctgcaagatcc

SEQ ID NO: 4794 - RNA, 20 nt, synthetic construct
  source 1..20: mol_type = other RNA
cacattttttgataatgtct

SEQ ID NO: 4795 - RNA, 20 nt, synthetic construct
  source 1..20: mol_type = other RNA
cacatttcttgtctcacttt

SEQ ID NO: 4796 - RNA, 20 nt, synthetic construct
  source 1..20: mol_type = other RNA
cacatcatccatataactga

SEQ ID NO: 4797 - RNA, 20 nt, synthetic construct
  source 1..20: mol_type = other RNA
cacatcatacaaaaaatcaa

SEQ ID NO: 4798 - RNA, 20 nt, synthetic construct
  source 1..20: mol_type = other RNA
cacatagcgcctcattttgt

SEQ ID NO: 4799 - RNA, 20 nt, synthetic construct
  source 1..20: mol_type = other RNA
cacagacggggagtccgcgt

SEQ ID NO: 4800 - RNA, 20 nt, synthetic construct
  source 1..20: mol_type = other RNA
cacagacctggccgttgccg

SEQ ID NO: 4801 - RNA, 20 nt, synthetic construct
  source 1..20: mol_type = other RNA
cacagaaaggccttgtaagt

SEQ ID NO: 4802 - RNA, 20 nt, synthetic construct
  source 1..20: mol_type = other RNA
cacacggtccggcagatgag

SEQ ID NO: 4803 - RNA, 20 nt, synthetic construct
  source 1..20: mol_type = other RNA
cacacggtagttccccctag

SEQ ID NO: 4804 - RNA, 20 nt, synthetic construct
  source 1..20: mol_type = other RNA
cacaagagttgcctgaactt

SEQ ID NO: 4805 - RNA, 20 nt, synthetic construct
  source 1..20: mol_type = other RNA
cacaagaacacatcatacaa

SEQ ID NO: 4806 - RNA, 20 nt, synthetic construct
  source 1..20: mol_type = other RNA
cacaacctttcaccaaactc

SEQ ID NO: 4807 - RNA, 20 nt, synthetic construct
  source 1..20: mol_type = other RNA
caattcgttgacatactttc

SEQ ID NO: 4808 - RNA, 20 nt, synthetic construct
  source 1..20: mol_type = other RNA
caatgtcaacgaccgacctt

SEQ ID NO: 4809 - RNA, 20 nt, synthetic construct
  source 1..20: mol_type = other RNA
caatgctcaggagactctaa

SEQ ID NO: 4810 - RNA, 20 nt, synthetic construct
  source 1..20: mol_type = other RNA
caatctggatttgctgtgtt

SEQ ID NO: 4811 - RNA, 20 nt, synthetic construct
  source 1..20: mol_type = other RNA
caatcgccagacaggaaggc

SEQ ID NO: 4812 - RNA, 20 nt, synthetic construct
  source 1..20: mol_type = other RNA
caatcccaacaaggacacct

SEQ ID NO: 4813 - RNA, 21 nt, synthetic construct
  source 1..21: mol_type = other RNA
caatcaataggcctgttaata

SEQ ID NO: 4814 - RNA, 20 nt, synthetic construct
  source 1..20: mol_type = other RNA
caatcaataggcctgttaat

SEQ ID NO: 4815 - RNA, 20 nt, synthetic construct
  source 1..20: mol_type = other RNA
caagttggaggacaggaggt

SEQ ID NO: 4816 - RNA, 20 nt, synthetic construct
  source 1..20: mol_type = other RNA
caaggacccataacttccaa

SEQ ID NO: 4817 - RNA, 20 nt, synthetic construct
  source 1..20: mol_type = other RNA
caagcctccaagctgtgcct

SEQ ID NO: 4818 - RNA, 20 nt, synthetic construct
  source 1..20: mol_type = other RNA
caagcaattctttgctgggg

SEQ ID NO: 4819 - RNA, 20 nt, synthetic construct
  source 1..20: mol_type = other RNA
caagatctacagcatggggc

SEQ ID NO: 4820 - RNA, 20 nt, synthetic construct
  source 1..20: mol_type = other RNA
caagagttgcctgaacttta

SEQ ID NO: 4821 - RNA, 20 nt, synthetic construct
  source 1..20: mol_type = other RNA
caagacattatcaaaaaatg

SEQ ID NO: 4822 - RNA, 20 nt, synthetic construct
  source 1..20: mol_type = other RNA
caagaatcctcacaataccg

SEQ ID NO: 4823 - RNA, 20 nt, synthetic construct
  source 1..20: mol_type = other RNA
caagaatatggtgacccaca

SEQ ID NO: 4824 - RNA, 21 nt, synthetic construct
  source 1..21: mol_type = other RNA
caagaagatgaggcatagcag

SEQ ID NO: 4825 - RNA, 20 nt, synthetic construct
  source 1..20: mol_type = other RNA
caagaagatgaggcatagca

SEQ ID NO: 4826 - RNA, 20 nt, synthetic construct
  source 1..20: mol_type = other RNA
caagaaatgtgaaaccacaa

SEQ ID NO: 4827 - RNA, 20 nt, synthetic construct
  source 1..20: mol_type = other RNA
caacttgtcctggttatcgc

SEQ ID NO: 4828 - RNA, 20 nt, synthetic construct
  source 1..20: mol_type = other RNA
caacctttcaccaaactctg

SEQ ID NO: 4829 - RNA, 20 nt, synthetic construct
  source 1..20: mol_type = other RNA
caaccaccagcacgggacca

SEQ ID NO: 4830 - RNA, 21 nt, synthetic construct
  source 1..21: mol_type = other RNA
caacattcggtgggcgttcac

SEQ ID NO: 4831 - RNA, 20 nt, synthetic construct
  source 1..20: mol_type = other RNA
caacattcggtgggcgttca

SEQ ID NO: 4832 - RNA, 20 nt, synthetic construct
  source 1..20: mol_type = other RNA
caacataccttgatagtcca

SEQ ID NO: 4833 - RNA, 21 nt, synthetic construct
  source 1..21: mol_type = other RNA
caacacatagcgcctcatttt

SEQ ID NO: 4834 - RNA, 20 nt, synthetic construct
  source 1..20: mol_type = other RNA
caaattaacacccacccagg

SEQ ID NO: 4835 - RNA, 20 nt, synthetic construct
  source 1..20: mol_type = other RNA
caaatggcactagtaaactg

SEQ ID NO: 4836 - RNA, 20 nt, synthetic construct
  source 1..20: mol_type = other RNA
caaatatttaccattggata

SEQ ID NO: 4837 - RNA, 20 nt, synthetic construct
  source 1..20: mol_type = other RNA
caaatatacatcgtatccat

SEQ ID NO: 4838 - RNA, 20 nt, synthetic construct
  source 1..20: mol_type = other RNA
caaagtttgtagtatgccct

SEQ ID NO: 4839 - RNA, 20 nt, synthetic construct
  source 1..20: mol_type = other RNA
caaaggtggagacagcgggg

SEQ ID NO: 4840 - RNA, 21 nt, synthetic construct
  source 1..21: mol_type = other RNA
caaaggacgtcccgcgcagga

SEQ ID NO: 4841 - RNA, 20 nt, synthetic construct
  source 1..20: mol_type = other RNA
caaagacaaaagaaaattgg

SEQ ID NO: 4842 - RNA, 20 nt, synthetic construct
  source 1..20: mol_type = other RNA
caaagaattgcttgcctgag

SEQ ID NO: 4843 - RNA, 20 nt, synthetic construct
  source 1..20: mol_type = other RNA
caaacacttggcacagacct

SEQ ID NO: 4844 - RNA, 20 nt, synthetic construct
  source 1..20: mol_type = other RNA
caaacacagcaaatccagat

SEQ ID NO: 4845 - RNA, 21 nt, synthetic construct
  source 1..21: mol_type = other RNA
caaaattcgcagtccccaacc

SEQ ID NO: 4846 - RNA, 20 nt, synthetic construct
  source 1..20: mol_type = other RNA
caaaagtgagacaagaaatg

SEQ ID NO: 4847 - RNA, 20 nt, synthetic construct
  source 1..20: mol_type = other RNA
caaaaggcctccgtgcggtg

SEQ ID NO: 4848 - RNA, 20 nt, synthetic construct
  source 1..20: mol_type = other RNA
caaaagaaaattggtaacag

SEQ ID NO: 4849 - RNA, 20 nt, synthetic construct
  source 1..20: mol_type = other RNA
caaaaacgagagtaactcca

SEQ ID NO: 4850 - RNA, 20 nt, synthetic construct
  source 1..20: mol_type = other RNA
caaaaaatgtgaacagtttg

SEQ ID NO: 4851 - RNA, 20 nt, synthetic construct
  source 1..20: mol_type = other RNA
caaaaaatcaaagaatgttt

SEQ ID NO: 4852 - RNA, 21 nt, synthetic construct
  source 1..21: mol_type = other RNA
attttttgataatgtcttggt

SEQ ID NO: 4853 - RNA, 20 nt, synthetic construct
  source 1..20: mol_type = other RNA
attttggccaagacacacgg

SEQ ID NO: 4854 - RNA, 20 nt, synthetic construct
  source 1..20: mol_type = other RNA
attttatgggttatgtcatt

SEQ ID NO: 4855 - RNA, 20 nt, synthetic construct
  source 1..20: mol_type = other RNA
atttgttcagtggttcgtag

SEQ ID NO: 4856 - RNA, 20 nt, synthetic construct
  source 1..20: mol_type = other RNA
atttggtgtctttcggagtg

SEQ ID NO: 4857 - RNA, 21 nt, synthetic construct
  source 1..21: mol_type = other RNA
atttggtggtctataagctgg

SEQ ID NO: 4858 - RNA, 20 nt, synthetic construct
  source 1..20: mol_type = other RNA
atttggtggtctataagctg

SEQ ID NO: 4859 - RNA, 20 nt, synthetic construct
  source 1..20: mol_type = other RNA
atttggaagatccagcatct

SEQ ID NO: 4860 - RNA, 20 nt, synthetic construct
  source 1..20: mol_type = other RNA
atttgctgtgtttgctctga

SEQ ID NO: 4861 - RNA, 20 nt, synthetic construct
  source 1..20: mol_type = other RNA
atttgcgggagaggacaaca

SEQ ID NO: 4862 - RNA, 20 nt, synthetic construct
  source 1..20: mol_type = other RNA
atttcttgtctcacttttgg

SEQ ID NO: 4863 - RNA, 20 nt, synthetic construct
  source 1..20: mol_type = other RNA
atttacaccaagacattatc

SEQ ID NO: 4864 - RNA, 21 nt, synthetic construct
  source 1..21: mol_type = other RNA
atttaaaccctaacaaaacaa

SEQ ID NO: 4865 - RNA, 20 nt, synthetic construct
  source 1..20: mol_type = other RNA
atttaaaccctaacaaaaca

SEQ ID NO: 4866 - RNA, 20 nt, synthetic construct
  source 1..20: mol_type = other RNA
attgtgtaaatggggcagca

SEQ ID NO: 4867 - RNA, 20 nt, synthetic construct
  source 1..20: mol_type = other RNA
attgtgggtcttttgggttt

SEQ ID NO: 4868 - RNA, 20 nt, synthetic construct
  source 1..20: mol_type = other RNA
attgtgaggattcttgtcaa

SEQ ID NO: 4869 - RNA, 20 nt, synthetic construct
  source 1..20: mol_type = other RNA
attggtaacagcggtaaaaa

SEQ ID NO: 4870 - RNA, 20 nt, synthetic construct
  source 1..20: mol_type = other RNA
attgggggccaagtctgtac

SEQ ID NO: 4871 - RNA, 20 nt, synthetic construct
  source 1..20: mol_type = other RNA
attgggacttcaatcccaac

SEQ ID NO: 4872 - RNA, 20 nt, synthetic construct
  source 1..20: mol_type = other RNA
attgagatcttctgcgacgc

SEQ ID NO: 4873 - RNA, 20 nt, synthetic construct
  source 1..20: mol_type = other RNA
attgagaccttcgtctgcga

SEQ ID NO: 4874 - RNA, 20 nt, synthetic construct
  source 1..20: mol_type = other RNA
attgaatacatgcatacaag

SEQ ID NO: 4875 - RNA, 20 nt, synthetic construct
  source 1..20: mol_type = other RNA
attctttcccgaccaccagt

SEQ ID NO: 4876 - RNA, 20 nt, synthetic construct
  source 1..20: mol_type = other RNA
attcttgggaacaagatcta

SEQ ID NO: 4877 - RNA, 20 nt, synthetic construct
  source 1..20: mol_type = other RNA
attcgcactcctccagctta

SEQ ID NO: 4878 - RNA, 20 nt, synthetic construct
  source 1..20: mol_type = other RNA
attccttggactcataaggt

SEQ ID NO: 4879 - RNA, 20 nt, synthetic construct
  source 1..20: mol_type = other RNA
attcctatgggagtgggcct

SEQ ID NO: 4880 - RNA, 20 nt, synthetic construct
  source 1..20: mol_type = other RNA
attcccatcccatcatcctg

SEQ ID NO: 4881 - RNA, 20 nt, synthetic construct
  source 1..20: mol_type = other RNA
attccaggatcctcaaccac

SEQ ID NO: 4882 - RNA, 20 nt, synthetic construct
  source 1..20: mol_type = other RNA
attcagcgccgacgggacgt

SEQ ID NO: 4883 - RNA, 20 nt, synthetic construct
  source 1..20: mol_type = other RNA
attaactgtaagtgggccta

SEQ ID NO: 4884 - RNA, 20 nt, synthetic construct
  source 1..20: mol_type = other RNA
attaacaggcctattgattg

SEQ ID NO: 4885 - RNA, 21 nt, synthetic construct
  source 1..21: mol_type = other RNA
attaacacccacccaggtagc

SEQ ID NO: 4886 - RNA, 20 nt, synthetic construct
  source 1..20: mol_type = other RNA
attaaaggtctttgtactag

SEQ ID NO: 4887 - RNA, 20 nt, synthetic construct
  source 1..20: mol_type = other RNA
attaaagacaggtacagtag

SEQ ID NO: 4888 - RNA, 20 nt, synthetic construct
  source 1..20: mol_type = other RNA
atgttgcccaaggtcttaca

SEQ ID NO: 4889 - RNA, 20 nt, synthetic construct
  source 1..20: mol_type = other RNA
atgttctggataataaggtt

SEQ ID NO: 4890 - RNA, 20 nt, synthetic construct
  source 1..20: mol_type = other RNA
atgttctccatgttcagcgc

SEQ ID NO: 4891 - RNA, 20 nt, synthetic construct
  source 1..20: mol_type = other RNA
atgtggttatcctgcgttaa

SEQ ID NO: 4892 - RNA, 20 nt, synthetic construct
  source 1..20: mol_type = other RNA
atgtgatgttctccatgttc

SEQ ID NO: 4893 - RNA, 20 nt, synthetic construct
  source 1..20: mol_type = other RNA
atgtcaacgaccgaccttga

SEQ ID NO: 4894 - RNA, 21 nt, synthetic construct
  source 1..21: mol_type = other RNA
atgtcaacactaatatgggcc

SEQ ID NO: 4895 - RNA, 20 nt, synthetic construct
  source 1..20: mol_type = other RNA
atgtatacccaaagacaaaa

SEQ ID NO: 4896 - RNA, 20 nt, synthetic construct
  source 1..20: mol_type = other RNA
atggtgaggtgaacaatgct

SEQ ID NO: 4897 - RNA, 20 nt, synthetic construct
  source 1..20: mol_type = other RNA
atggtcccgtgctggtggtt

SEQ ID NO: 4898 - RNA, 21 nt, synthetic construct
  source 1..21: mol_type = other RNA
atggtaaatatttggtaacct

SEQ ID NO: 4899 - RNA, 20 nt, synthetic construct
  source 1..20: mol_type = other RNA
atggggcagcaaaacccaaa

SEQ ID NO: 4900 - RNA, 21 nt, synthetic construct
  source 1..21: mol_type = other RNA
atggggcagaatctttccacc

SEQ ID NO: 4901 - RNA, 20 nt, synthetic construct
  source 1..20: mol_type = other RNA
atggggcagaatctttccac

SEQ ID NO: 4902 - RNA, 20 nt, synthetic construct
  source 1..20: mol_type = other RNA
atgggccatcagcgcgtgcg

SEQ ID NO: 4903 - RNA, 20 nt, synthetic construct
  source 1..20: mol_type = other RNA
atgggatgggaatacaggtg

SEQ ID NO: 4904 - RNA, 21 nt, synthetic construct
  source 1..21: mol_type = other RNA
atggcccatgaccaagcccca

SEQ ID NO: 4905 - RNA, 20 nt, synthetic construct
  source 1..20: mol_type = other RNA
atggcccatgaccaagcccc

SEQ ID NO: 4906 - RNA, 20 nt, synthetic construct
  source 1..20: mol_type = other RNA
atggcactagtaaactgagc

SEQ ID NO: 4907 - RNA, 20 nt, synthetic construct
  source 1..20: mol_type = other RNA
atggatgatgtggtattggg

SEQ ID NO: 4908 - RNA, 21 nt, synthetic construct
  source 1..21: mol_type = other RNA
atggatcggcagaggagccga

SEQ ID NO: 4909 - RNA, 20 nt, synthetic construct
  source 1..20: mol_type = other RNA
atggatcggcagaggagccg

SEQ ID NO: 4910 - RNA, 20 nt, synthetic construct
  source 1..20: mol_type = other RNA
atggatacgatgtatatttg

SEQ ID NO: 4911 - RNA, 20 nt, synthetic construct
  source 1..20: mol_type = other RNA
atggacatcgacccttataa

SEQ ID NO: 4912 - RNA, 20 nt, synthetic construct
  source 1..20: mol_type = other RNA
atgctgtagatcttgttccc

SEQ ID NO: 4913 - RNA, 21 nt, synthetic construct
  source 1..21: mol_type = other RNA
atgcgacgtgcagaggtgaag

SEQ ID NO: 4914 - RNA, 20 nt, synthetic construct
  source 1..20: mol_type = other RNA
atgcctgctaggttttatcc

SEQ ID NO: 4915 - RNA, 20 nt, synthetic construct
  source 1..20: mol_type = other RNA
atgcctacagcctcctagta

SEQ ID NO: 4916 - RNA, 20 nt, synthetic construct
  source 1..20: mol_type = other RNA
atgcatgtattcaatctaag

SEQ ID NO: 4917 - RNA, 21 nt, synthetic construct
  source 1..21: mol_type = other RNA
atgcatacaagggcattaacg

SEQ ID NO: 4918 - RNA, 20 nt, synthetic construct
  source 1..20: mol_type = other RNA
atgcatacaagggcattaac

SEQ ID NO: 4919 - RNA, 20 nt, synthetic construct
  source 1..20: mol_type = other RNA
atgattaggcagaggtgaaa

SEQ ID NO: 4920 - RNA, 20 nt, synthetic construct
  source 1..20: mol_type = other RNA
atgatgtgttcttgtggcaa

SEQ ID NO: 4921 - RNA, 20 nt, synthetic construct
  source 1..20: mol_type = other RNA
atgatgtggtattgggggcc

SEQ ID NO: 4922 - RNA, 21 nt, synthetic construct
  source 1..21: mol_type = other RNA
atgatgggatgggaatacagg

SEQ ID NO: 4923 - RNA, 20 nt, synthetic construct
  source 1..20: mol_type = other RNA
atgagtgtttctcaaaggtg

SEQ ID NO: 4924 - RNA, 20 nt, synthetic construct
  source 1..20: mol_type = other RNA
atgaggcatagcagcaggat

SEQ ID NO: 4925 - RNA, 20 nt, synthetic construct
  source 1..20: mol_type = other RNA
atgaggattaaagacaggta

SEQ ID NO: 4926 - RNA, 20 nt, synthetic construct
  source 1..20: mol_type = other RNA
atgactctagctacctgggt

SEQ ID NO: 4927 - RNA, 20 nt, synthetic construct
  source 1..20: mol_type = other RNA
atgaccaagccccagccagt

SEQ ID NO: 4928 - RNA, 20 nt, synthetic construct
  source 1..20: mol_type = other RNA
atgacataacccataaaatt

SEQ ID NO: 4929 - RNA, 21 nt, synthetic construct
  source 1..21: mol_type = other RNA
atgaacaagagatgattaggc

SEQ ID NO: 4930 - RNA, 20 nt, synthetic construct
  source 1..20: mol_type = other RNA
atgaacaagagatgattagg

SEQ ID NO: 4931 - RNA, 21 nt, synthetic construct
  source 1..21: mol_type = other RNA
atctttccaccagcaatcctc

SEQ ID NO: 4932 - RNA, 20 nt, synthetic construct
  source 1..20: mol_type = other RNA
atcttgcagagtttggtgaa

SEQ ID NO: 4933 - RNA, 20 nt, synthetic construct
  source 1..20: mol_type = other RNA
atcttcttgttggttcttct

SEQ ID NO: 4934 - RNA, 20 nt, synthetic construct
  source 1..20: mol_type = other RNA
atcttctgcgacgcggcgat

SEQ ID NO: 4935 - RNA, 21 nt, synthetic construct
  source 1..21: mol_type = other RNA
atcttccaaattaacacccac

SEQ ID NO: 4936 - RNA, 21 nt, synthetic construct
  source 1..21: mol_type = other RNA
atctctttgttttgttagggt

SEQ ID NO: 4937 - RNA, 20 nt, synthetic construct
  source 1..20: mol_type = other RNA
atctagttaatcattacttc

SEQ ID NO: 4938 - RNA, 20 nt, synthetic construct
  source 1..20: mol_type = other RNA
atctagaagatctcgtactg

SEQ ID NO: 4939 - RNA, 20 nt, synthetic construct
  source 1..20: mol_type = other RNA
atcgacccttataaagaatt

SEQ ID NO: 4940 - RNA, 20 nt, synthetic construct
  source 1..20: mol_type = other RNA
atcctgcggacgacccttct

SEQ ID NO: 4941 - RNA, 20 nt, synthetic construct
  source 1..20: mol_type = other RNA
atcctcgagaagattgacga

SEQ ID NO: 4942 - RNA, 20 nt, synthetic construct
  source 1..20: mol_type = other RNA
atccctcctgttgctgtacc

SEQ ID NO: 4943 - RNA, 20 nt, synthetic construct
  source 1..20: mol_type = other RNA
atcccatcatcctgggcttt

SEQ ID NO: 4944 - RNA, 21 nt, synthetic construct
  source 1..21: mol_type = other RNA
atcccagaggattgctggtgg

SEQ ID NO: 4945 - RNA, 20 nt, synthetic construct
  source 1..20: mol_type = other RNA
atcccagaggattgctggtg

SEQ ID NO: 4946 - RNA, 20 nt, synthetic construct
  source 1..20: mol_type = other RNA
atccatactgcggaactcct

SEQ ID NO: 4947 - RNA, 20 nt, synthetic construct
  source 1..20: mol_type = other RNA
atccagttggcagcacagcc

SEQ ID NO: 4948 - RNA, 20 nt, synthetic construct
  source 1..20: mol_type = other RNA
atccacactccgaaagacac

SEQ ID NO: 4949 - RNA, 20 nt, synthetic construct
  source 1..20: mol_type = other RNA
atccaatggtaaatatttgg

SEQ ID NO: 4950 - RNA, 20 nt, synthetic construct
  source 1..20: mol_type = other RNA
atccaactggtggtcgggaa

SEQ ID NO: 4951 - RNA, 20 nt, synthetic construct
  source 1..20: mol_type = other RNA
atccaaaggttaccaaatat

SEQ ID NO: 4952 - RNA, 20 nt, synthetic construct
  source 1..20: mol_type = other RNA
atcaataggcctgttaatag

SEQ ID NO: 4953 - RNA, 20 nt, synthetic construct
  source 1..20: mol_type = other RNA
atatttggtaacctttggat

SEQ ID NO: 4954 - RNA, 20 nt, synthetic construct
  source 1..20: mol_type = other RNA
atatttgcgggagaggacaa

SEQ ID NO: 4955 - RNA, 20 nt, synthetic construct
  source 1..20: mol_type = other RNA
atatggtgacccacaaaatg

SEQ ID NO: 4956 - RNA, 20 nt, synthetic construct
  source 1..20: mol_type = other RNA
atatgggcctaaagttcagg

SEQ ID NO: 4957 - RNA, 20 nt, synthetic construct
  source 1..20: mol_type = other RNA
atatggatgatgtggtattg

SEQ ID NO: 4958 - RNA, 20 nt, synthetic construct
  source 1..20: mol_type = other RNA
atatacatcgtatccatggc

SEQ ID NO: 4959 - RNA, 21 nt, synthetic construct
  source 1..21: mol_type = other RNA
atataatatacccgccttcca

SEQ ID NO: 4960 - RNA, 21 nt, synthetic construct
  source 1..21: mol_type = other RNA
atagtccagaagaaccaacaa

SEQ ID NO: 4961 - RNA, 20 nt, synthetic construct
  source 1..20: mol_type = other RNA
atagtccagaagaaccaaca

SEQ ID NO: 4962 - RNA, 20 nt, synthetic construct
  source 1..20: mol_type = other RNA
ataggaattttccgaaagcc

SEQ ID NO: 4963 - RNA, 20 nt, synthetic construct
  source 1..20: mol_type = other RNA
atagcgcctcattttgtggg

SEQ ID NO: 4964 - RNA, 20 nt, synthetic construct
  source 1..20: mol_type = other RNA
atagcagcaggatgaagagg

SEQ ID NO: 4965 - RNA, 20 nt, synthetic construct
  source 1..20: mol_type = other RNA
atagagtatttggtgtcttt

SEQ ID NO: 4966 - RNA, 20 nt, synthetic construct
  source 1..20: mol_type = other RNA
atactacaaactttgccagc

SEQ ID NO: 4967 - RNA, 20 nt, synthetic construct
  source 1..20: mol_type = other RNA
atactaacattgaggttccc

SEQ ID NO: 4968 - RNA, 20 nt, synthetic construct
  source 1..20: mol_type = other RNA
atacgatgtatatttgcggg

SEQ ID NO: 4969 - RNA, 20 nt, synthetic construct
  source 1..20: mol_type = other RNA
ataccgcctcagctctgtat

SEQ ID NO: 4970 - RNA, 20 nt, synthetic construct
  source 1..20: mol_type = other RNA
atacatgcatacaagggcat

SEQ ID NO: 4971 - RNA, 21 nt, synthetic construct
  source 1..21: mol_type = other RNA
atacatagaggttccttgagc

SEQ ID NO: 4972 - RNA, 20 nt, synthetic construct
  source 1..20: mol_type = other RNA
atacatagaggttccttgag

SEQ ID NO: 4973 - RNA, 21 nt, synthetic construct
  source 1..21: mol_type = other RNA
atacaggtgcaatttccgtcc

SEQ ID NO: 4974 - RNA, 20 nt, synthetic construct
  source 1..20: mol_type = other RNA
atacaggtgcaatttccgtc

SEQ ID NO: 4975 - RNA, 20 nt, synthetic construct
  source 1..20: mol_type = other RNA
ataatatacccgccttccat

SEQ ID NO: 4976 - RNA, 20 nt, synthetic construct
  source 1..20: mol_type = other RNA
ataagggagaggcagtagtc

SEQ ID NO: 4977 - RNA, 20 nt, synthetic construct
  source 1..20: mol_type = other RNA
ataagagagaaacaacacat

SEQ ID NO: 4978 - RNA, 20 nt, synthetic construct
  source 1..20: mol_type = other RNA
ataactgactactaggtctc

SEQ ID NO: 4979 - RNA, 20 nt, synthetic construct
  source 1..20: mol_type = other RNA
ataactgaaagccaaacagt

SEQ ID NO: 4980 - RNA, 21 nt, synthetic construct
  source 1..21: mol_type = other RNA
ataactctgttgtcctctccc

SEQ ID NO: 4981 - RNA, 20 nt, synthetic construct
  source 1..20: mol_type = other RNA
ataactctgttgtcctctcc

SEQ ID NO: 4982 - RNA, 20 nt, synthetic construct
  source 1..20: mol_type = other RNA
ataaccacattgtgtaaatg

SEQ ID NO: 4983 - RNA, 20 nt, synthetic construct
  source 1..20: mol_type = other RNA
ataaattggtctgcgcacca

SEQ ID NO: 4984 - RNA, 21 nt, synthetic construct
  source 1..21: mol_type = other RNA
ataaagaatttggagctactg

SEQ ID NO: 4985 - RNA, 20 nt, synthetic construct
  source 1..20: mol_type = other RNA
agtttccggaagtgttgata

SEQ ID NO: 4986 - RNA, 20 nt, synthetic construct
  source 1..20: mol_type = other RNA
agttggcagcacagcctagc

SEQ ID NO: 4987 - RNA, 20 nt, synthetic construct
  source 1..20: mol_type = other RNA
agttgcatggtgctggtgcg

SEQ ID NO: 4988 - RNA, 20 nt, synthetic construct
  source 1..20: mol_type = other RNA
agttcttcttctaggggacc

SEQ ID NO: 4989 - RNA, 20 nt, synthetic construct
  source 1..20: mol_type = other RNA
agttccgcagtatggatcgg

SEQ ID NO: 4990 - RNA, 21 nt, synthetic construct
  source 1..21: mol_type = other RNA
agttccccctagaaaattgag

SEQ ID NO: 4991 - RNA, 20 nt, synthetic construct
  source 1..20: mol_type = other RNA
agttccccctagaaaattga

SEQ ID NO: 4992 - RNA, 20 nt, synthetic construct
  source 1..20: mol_type = other RNA
agttccccccagcaaagaat

SEQ ID NO: 4993 - RNA, 20 nt, synthetic construct
  source 1..20: mol_type = other RNA
agttccccaccttatgagtc

SEQ ID NO: 4994 - RNA, 20 nt, synthetic construct
  source 1..20: mol_type = other RNA
agttatgtcaacactaatat

SEQ ID NO: 4995 - RNA, 20 nt, synthetic construct
  source 1..20: mol_type = other RNA
agttatgggtccttgccaca

SEQ ID NO: 4996 - RNA, 20 nt, synthetic construct
  source 1..20: mol_type = other RNA
agttaatgagaaaagaagat

SEQ ID NO: 4997 - RNA, 21 nt, synthetic construct
  source 1..21: mol_type = other RNA
agtgttgataggataggggca

SEQ ID NO: 4998 - RNA, 20 nt, synthetic construct
  source 1..20: mol_type = other RNA
agtgtggattcgcactcctc

SEQ ID NO: 4999 - RNA, 20 nt, synthetic construct
  source 1..20: mol_type = other RNA
agtgtctagtttggaagtaa

SEQ ID NO: 5000 - RNA, 20 nt, synthetic construct
  source 1..20: mol_type = other RNA
agtgcgaatccacactccga

SEQ ID NO: 5001 - RNA, 20 nt, synthetic construct
  source 1..20: mol_type = other RNA
agtgcacacggtccggcaga

SEQ ID NO: 5002 - RNA, 21 nt, synthetic construct
  source 1..21: mol_type = other RNA
agtgattggaggttggggact

SEQ ID NO: 5003 - RNA, 20 nt, synthetic construct
  source 1..20: mol_type = other RNA
agtgattggaggttggggac

SEQ ID NO: 5004 - RNA, 20 nt, synthetic construct
  source 1..20: mol_type = other RNA
agtgaaagcctgcttagatt

SEQ ID NO: 5005 - RNA, 20 nt, synthetic construct
  source 1..20: mol_type = other RNA
agtctttgaagtatgcctca

SEQ ID NO: 5006 - RNA, 21 nt, synthetic construct
  source 1..21: mol_type = other RNA
agtctttaaacaaacagtctt

SEQ ID NO: 5007 - RNA, 20 nt, synthetic construct
  source 1..20: mol_type = other RNA
agtcctcttatgtaagacct

SEQ ID NO: 5008 - RNA, 20 nt, synthetic construct
  source 1..20: mol_type = other RNA
agtccgcgtaaagagaggtg

SEQ ID NO: 5009 - RNA, 20 nt, synthetic construct
  source 1..20: mol_type = other RNA
agtcccgataatgtttgctc

SEQ ID NO: 5010 - RNA, 20 nt, synthetic construct
  source 1..20: mol_type = other RNA
agtccccaacctccaatcac

SEQ ID NO: 5011 - RNA, 20 nt, synthetic construct
  source 1..20: mol_type = other RNA
agtcccaagcgaccccgaga

SEQ ID NO: 5012 - RNA, 20 nt, synthetic construct
  source 1..20: mol_type = other RNA
agtccagaagaaccaacaag

SEQ ID NO: 5013 - RNA, 20 nt, synthetic construct
  source 1..20: mol_type = other RNA
agtccaagagtcctcttatg

SEQ ID NO: 5014 - RNA, 21 nt, synthetic construct
  source 1..21: mol_type = other RNA
agtcattagttccccccagca

SEQ ID NO: 5015 - RNA, 20 nt, synthetic construct
  source 1..20: mol_type = other RNA
agtcattagttccccccagc

SEQ ID NO: 5016 - RNA, 21 nt, synthetic construct
  source 1..21: mol_type = other RNA
agtagtttccggaagtgttga

SEQ ID NO: 5017 - RNA, 20 nt, synthetic construct
  source 1..20: mol_type = other RNA
agtagtttccggaagtgttg

SEQ ID NO: 5018 - RNA, 20 nt, synthetic construct
  source 1..20: mol_type = other RNA
agtaggacatgaacaagaga

SEQ ID NO: 5019 - RNA, 20 nt, synthetic construct
  source 1..20: mol_type = other RNA
agtagctccaaattctttat

SEQ ID NO: 5020 - RNA, 20 nt, synthetic construct
  source 1..20: mol_type = other RNA
agtagaagaataaagaccag

SEQ ID NO: 5021 - RNA, 21 nt, synthetic construct
  source 1..21: mol_type = other RNA
agtaatgattaactagatgtt

SEQ ID NO: 5022 - RNA, 20 nt, synthetic construct
  source 1..20: mol_type = other RNA
agtaactccacagtagctcc

SEQ ID NO: 5023 - RNA, 20 nt, synthetic construct
  source 1..20: mol_type = other RNA
agtaaagttccccaccttat

SEQ ID NO: 5024 - RNA, 20 nt, synthetic construct
  source 1..20: mol_type = other RNA
aggttttatccaaaggttac

SEQ ID NO: 5025 - RNA, 20 nt, synthetic construct
  source 1..20: mol_type = other RNA
aggtttggtacagcaacagg

SEQ ID NO: 5026 - RNA, 20 nt, synthetic construct
  source 1..20: mol_type = other RNA
aggttggggactgcgaattt

SEQ ID NO: 5027 - RNA, 20 nt, synthetic construct
  source 1..20: mol_type = other RNA
aggttccacgcacgcgctga

SEQ ID NO: 5028 - RNA, 20 nt, synthetic construct
  source 1..20: mol_type = other RNA
aggttcaggtattgtttaca

SEQ ID NO: 5029 - RNA, 20 nt, synthetic construct
  source 1..20: mol_type = other RNA
aggtgtccttgttgggattg

SEQ ID NO: 5030 - RNA, 20 nt, synthetic construct
  source 1..20: mol_type = other RNA
aggtgcgccccgtggtcggt

SEQ ID NO: 5031 - RNA, 20 nt, synthetic construct
  source 1..20: mol_type = other RNA
aggtctggagcaaacattat

SEQ ID NO: 5032 - RNA, 20 nt, synthetic construct
  source 1..20: mol_type = other RNA
aggtctcaatcgccgcgtcg

SEQ ID NO: 5033 - RNA, 21 nt, synthetic construct
  source 1..21: mol_type = other RNA
aggtcggtcgttgacattgca

SEQ ID NO: 5034 - RNA, 20 nt, synthetic construct
  source 1..20: mol_type = other RNA
aggtcggtcgttgacattgc

SEQ ID NO: 5035 - RNA, 20 nt, synthetic construct
  source 1..20: mol_type = other RNA
aggtattgtttacacagaaa

SEQ ID NO: 5036 - RNA, 21 nt, synthetic construct
  source 1..21: mol_type = other RNA
aggtatgttgcccgtttgtcc

SEQ ID NO: 5037 - RNA, 20 nt, synthetic construct
  source 1..20: mol_type = other RNA
aggtaggagctggagcattc

SEQ ID NO: 5038 - RNA, 21 nt, synthetic construct
  source 1..21: mol_type = other RNA
aggtacagtagaagaataaag

SEQ ID NO: 5039 - RNA, 20 nt, synthetic construct
  source 1..20: mol_type = other RNA
agggtttactgctcctgaac

SEQ ID NO: 5040 - RNA, 20 nt, synthetic construct
  source 1..20: mol_type = other RNA
agggtttaaatgtataccca

SEQ ID NO: 5041 - RNA, 20 nt, synthetic construct
  source 1..20: mol_type = other RNA
agggtcgatgtccatgcccc

SEQ ID NO: 5042 - RNA, 20 nt, synthetic construct
  source 1..20: mol_type = other RNA
aggggcatttggtggtctat

SEQ ID NO: 5043 - RNA, 20 nt, synthetic construct
  source 1..20: mol_type = other RNA
aggggacctgcctcgtcgtc

SEQ ID NO: 5044 - RNA, 20 nt, synthetic construct
  source 1..20: mol_type = other RNA
agggctttcccccactgttt

SEQ ID NO: 5045 - RNA, 20 nt, synthetic construct
  source 1..20: mol_type = other RNA
agggatacatagaggttcct

SEQ ID NO: 5046 - RNA, 21 nt, synthetic construct
  source 1..21: mol_type = other RNA
agggagaggcagtagtcggaa

SEQ ID NO: 5047 - RNA, 20 nt, synthetic construct
  source 1..20: mol_type = other RNA
agggactcaagatgctgtac

SEQ ID NO: 5048 - RNA, 20 nt, synthetic construct
  source 1..20: mol_type = other RNA
aggcttgaacagtaggacat

SEQ ID NO: 5049 - RNA, 20 nt, synthetic construct
  source 1..20: mol_type = other RNA
aggcttcccgatacagagct

SEQ ID NO: 5050 - RNA, 21 nt, synthetic construct
  source 1..21: mol_type = other RNA
aggctgccttcctgtctggcg

SEQ ID NO: 5051 - RNA, 20 nt, synthetic construct
  source 1..20: mol_type = other RNA
aggcgggtatattatataag

SEQ ID NO: 5052 - RNA, 20 nt, synthetic construct
  source 1..20: mol_type = other RNA
aggcgagggagttcttcttc

SEQ ID NO: 5053 - RNA, 20 nt, synthetic construct
  source 1..20: mol_type = other RNA
aggccttgtaagttggcgag

SEQ ID NO: 5054 - RNA, 20 nt, synthetic construct
  source 1..20: mol_type = other RNA
aggcctccgtgcggtggggt

SEQ ID NO: 5055 - RNA, 20 nt, synthetic construct
  source 1..20: mol_type = other RNA
aggcccacttacagttaatg

SEQ ID NO: 5056 - RNA, 20 nt, synthetic construct
  source 1..20: mol_type = other RNA
aggcatagcagcaggatgaa

SEQ ID NO: 5057 - RNA, 20 nt, synthetic construct
  source 1..20: mol_type = other RNA
aggcaggtcccctagaagaa

SEQ ID NO: 5058 - RNA, 20 nt, synthetic construct
  source 1..20: mol_type = other RNA
aggcaggaggcggatttgct

SEQ ID NO: 5059 - RNA, 21 nt, synthetic construct
  source 1..21: mol_type = other RNA
aggcaaaaacgagagtaactc

SEQ ID NO: 5060 - RNA, 20 nt, synthetic construct
  source 1..20: mol_type = other RNA
aggattggggaccctgcgct

SEQ ID NO: 5061 - RNA, 20 nt, synthetic construct
  source 1..20: mol_type = other RNA
aggattcttgtcaacaagaa

SEQ ID NO: 5062 - RNA, 20 nt, synthetic construct
  source 1..20: mol_type = other RNA
aggattaaagacaggtacag

SEQ ID NO: 5063 - RNA, 20 nt, synthetic construct
  source 1..20: mol_type = other RNA
aggatgatgggatgggaata

SEQ ID NO: 5064 - RNA, 20 nt, synthetic construct
  source 1..20: mol_type = other RNA
aggatgaagaggaagatgat

SEQ ID NO: 5065 - RNA, 20 nt, synthetic construct
  source 1..20: mol_type = other RNA
aggatcctggaattagagga

SEQ ID NO: 5066 - RNA, 20 nt, synthetic construct
  source 1..20: mol_type = other RNA
aggatcctcaaccaccagca

SEQ ID NO: 5067 - RNA, 20 nt, synthetic construct
  source 1..20: mol_type = other RNA
aggagttgggggaggagatt

SEQ ID NO: 5068 - RNA, 20 nt, synthetic construct
  source 1..20: mol_type = other RNA
aggagtgcgaatccacactc

SEQ ID NO: 5069 - RNA, 20 nt, synthetic construct
  source 1..20: mol_type = other RNA
aggaggttggtgagtgattg

SEQ ID NO: 5070 - RNA, 20 nt, synthetic construct
  source 1..20: mol_type = other RNA
aggaggcggatttgctggca

SEQ ID NO: 5071 - RNA, 20 nt, synthetic construct
  source 1..20: mol_type = other RNA
aggagctggagcattcgggc

SEQ ID NO: 5072 - RNA, 20 nt, synthetic construct
  source 1..20: mol_type = other RNA
aggagcagtaaaccctgttc

SEQ ID NO: 5073 - RNA, 20 nt, synthetic construct
  source 1..20: mol_type = other RNA
aggacgtcccgcgcaggatc

SEQ ID NO: 5074 - RNA, 20 nt, synthetic construct
  source 1..20: mol_type = other RNA
aggaccccttctcgtgttac

SEQ ID NO: 5075 - RNA, 20 nt, synthetic construct
  source 1..20: mol_type = other RNA
aggacaagttggaggacagg

SEQ ID NO: 5076 - RNA, 21 nt, synthetic construct
  source 1..21: mol_type = other RNA
aggaattttccgaaagcccag

SEQ ID NO: 5077 - RNA, 20 nt, synthetic construct
  source 1..20: mol_type = other RNA
aggaattttccgaaagccca

SEQ ID NO: 5078 - RNA, 21 nt, synthetic construct
  source 1..21: mol_type = other RNA
aggaagttttctaaaacattc

SEQ ID NO: 5079 - RNA, 20 nt, synthetic construct
  source 1..20: mol_type = other RNA
aggaagatgataaaacgccg

SEQ ID NO: 5080 - RNA, 20 nt, synthetic construct
  source 1..20: mol_type = other RNA
aggaaagaagtcagaaggca

SEQ ID NO: 5081 - RNA, 20 nt, synthetic construct
  source 1..20: mol_type = other RNA
agcttggaggcttgaacagt

SEQ ID NO: 5082 - RNA, 20 nt, synthetic construct
  source 1..20: mol_type = other RNA
agctgtgccttgggtggctt

SEQ ID NO: 5083 - RNA, 20 nt, synthetic construct
  source 1..20: mol_type = other RNA
agctctgtatcgggaagcct

SEQ ID NO: 5084 - RNA, 21 nt, synthetic construct
  source 1..21: mol_type = other RNA
agctccaaattctttataagg

SEQ ID NO: 5085 - RNA, 21 nt, synthetic construct
  source 1..21: mol_type = other RNA
agcggctaggagttccgcagt

SEQ ID NO: 5086 - RNA, 20 nt, synthetic construct
  source 1..20: mol_type = other RNA
agcgccgacgggacgtaaac

SEQ ID NO: 5087 - RNA, 20 nt, synthetic construct
  source 1..20: mol_type = other RNA
agcgcagggtccccaatcct

SEQ ID NO: 5088 - RNA, 20 nt, synthetic construct
  source 1..20: mol_type = other RNA
agcgataaccaggacaagtt

SEQ ID NO: 5089 - RNA, 20 nt, synthetic construct
  source 1..20: mol_type = other RNA
agccttcagagcaaacacag

SEQ ID NO: 5090 - RNA, 20 nt, synthetic construct
  source 1..20: mol_type = other RNA
agcctgagggctccacccca

SEQ ID NO: 5091 - RNA, 20 nt, synthetic construct
  source 1..20: mol_type = other RNA
agccgaaaaggttccacgca

SEQ ID NO: 5092 - RNA, 20 nt, synthetic construct
  source 1..20: mol_type = other RNA
agccctacgaaccactgaac

SEQ ID NO: 5093 - RNA, 20 nt, synthetic construct
  source 1..20: mol_type = other RNA
agcccaggatgatgggatgg

SEQ ID NO: 5094 - RNA, 20 nt, synthetic construct
  source 1..20: mol_type = other RNA
agccaggagaaacgggctga

SEQ ID NO: 5095 - RNA, 20 nt, synthetic construct
  source 1..20: mol_type = other RNA
agcagtagtcatgcaggttc

SEQ ID NO: 5096 - RNA, 21 nt, synthetic construct
  source 1..21: mol_type = other RNA
agcaattctttgctgggggga

SEQ ID NO: 5097 - RNA, 20 nt, synthetic construct
  source 1..20: mol_type = other RNA
agcaacaggagggatacata

SEQ ID NO: 5098 - RNA, 20 nt, synthetic construct
  source 1..20: mol_type = other RNA
agcaaatccgcctcctgcct

SEQ ID NO: 5099 - RNA, 20 nt, synthetic construct
  source 1..20: mol_type = other RNA
agcaaaacccaaaagaccca

SEQ ID NO: 5100 - RNA, 20 nt, synthetic construct
  source 1..20: mol_type = other RNA
agattgcaattgattatgcc

SEQ ID NO: 5101 - RNA, 20 nt, synthetic construct
  source 1..20: mol_type = other RNA
agattgaatacatgcataca

SEQ ID NO: 5102 - RNA, 20 nt, synthetic construct
  source 1..20: mol_type = other RNA
agattaaaggtctttgtact

SEQ ID NO: 5103 - RNA, 21 nt, synthetic construct
  source 1..21: mol_type = other RNA
agatgctgtacagacttggcc

SEQ ID NO: 5104 - RNA, 20 nt, synthetic construct
  source 1..20: mol_type = other RNA
agatgctggatcttccaaat

SEQ ID NO: 5105 - RNA, 20 nt, synthetic construct
  source 1..20: mol_type = other RNA
agatgattaggcagaggtga

SEQ ID NO: 5106 - RNA, 20 nt, synthetic construct
  source 1..20: mol_type = other RNA
agatgagaaggcacagacgg

SEQ ID NO: 5107 - RNA, 20 nt, synthetic construct
  source 1..20: mol_type = other RNA
agatcttgttcccaagaata

SEQ ID NO: 5108 - RNA, 20 nt, synthetic construct
  source 1..20: mol_type = other RNA
agatcttctagataccgcct

SEQ ID NO: 5109 - RNA, 20 nt, synthetic construct
  source 1..20: mol_type = other RNA
agatctcgtactgaaggaaa

SEQ ID NO: 5110 - RNA, 21 nt, synthetic construct
  source 1..21: mol_type = other RNA
agatccagcatctagagacct

SEQ ID NO: 5111 - RNA, 20 nt, synthetic construct
  source 1..20: mol_type = other RNA
agatccagcatctagagacc

SEQ ID NO: 5112 - RNA, 20 nt, synthetic construct
  source 1..20: mol_type = other RNA
agagtttggtgaaaggttgt

SEQ ID NO: 5113 - RNA, 21 nt, synthetic construct
  source 1..21: mol_type = other RNA
agagtcccaagcgaccccgag

SEQ ID NO: 5114 - RNA, 20 nt, synthetic construct
  source 1..20: mol_type = other RNA
agagtcccaagcgaccccga

SEQ ID NO: 5115 - RNA, 20 nt, synthetic construct
  source 1..20: mol_type = other RNA
agagtatttggtgtctttcg

SEQ ID NO: 5116 - RNA, 20 nt, synthetic construct
  source 1..20: mol_type = other RNA
agaggcctgtatttccctgc

SEQ ID NO: 5117 - RNA, 20 nt, synthetic construct
  source 1..20: mol_type = other RNA
agaggaagatgataaaacgc

SEQ ID NO: 5118 - RNA, 20 nt, synthetic construct
  source 1..20: mol_type = other RNA
agagctgaggcggtatctag

SEQ ID NO: 5119 - RNA, 20 nt, synthetic construct
  source 1..20: mol_type = other RNA
agagcaaacacagcaaatcc

SEQ ID NO: 5120 - RNA, 20 nt, synthetic construct
  source 1..20: mol_type = other RNA
agagatgattaggcagaggt

SEQ ID NO: 5121 - RNA, 20 nt, synthetic construct
  source 1..20: mol_type = other RNA
agagagtcccaagcgacccc

SEQ ID NO: 5122 - RNA, 20 nt, synthetic construct
  source 1..20: mol_type = other RNA
agagaggtgcgccccgtggt

SEQ ID NO: 5123 - RNA, 20 nt, synthetic construct
  source 1..20: mol_type = other RNA
agagaagtccaccacgagtc

SEQ ID NO: 5124 - RNA, 20 nt, synthetic construct
  source 1..20: mol_type = other RNA
agactgtttgtttaaagact

SEQ ID NO: 5125 - RNA, 21 nt, synthetic construct
  source 1..21: mol_type = other RNA
agactgggaggagttggggga

SEQ ID NO: 5126 - RNA, 20 nt, synthetic construct
  source 1..20: mol_type = other RNA
agactgggaggagttggggg

SEQ ID NO: 5127 - RNA, 21 nt, synthetic construct
  source 1..21: mol_type = other RNA
agacggggagtccgcgtaaag

SEQ ID NO: 5128 - RNA, 20 nt, synthetic construct
  source 1..20: mol_type = other RNA
agacggggagtccgcgtaaa

SEQ ID NO: 5129 - RNA, 20 nt, synthetic construct
  source 1..20: mol_type = other RNA
agacggagaaggggacgaga

SEQ ID NO: 5130 - RNA, 20 nt, synthetic construct
  source 1..20: mol_type = other RNA
agacgacgaggcaggtcccc

SEQ ID NO: 5131 - RNA, 20 nt, synthetic construct
  source 1..20: mol_type = other RNA
agaccttgggcaacattcgg

SEQ ID NO: 5132 - RNA, 21 nt, synthetic construct
  source 1..21: mol_type = other RNA
agaccttcgtctgcgaggcga

SEQ ID NO: 5133 - RNA, 20 nt, synthetic construct
  source 1..20: mol_type = other RNA
agaccttcgtctgcgaggcg

SEQ ID NO: 5134 - RNA, 20 nt, synthetic construct
  source 1..20: mol_type = other RNA
agacctgctgcgagcaaaac

SEQ ID NO: 5135 - RNA, 20 nt, synthetic construct
  source 1..20: mol_type = other RNA
agaccaccgtgaacgcccac

SEQ ID NO: 5136 - RNA, 20 nt, synthetic construct
  source 1..20: mol_type = other RNA
agacaggtacagtagaagaa

SEQ ID NO: 5137 - RNA, 20 nt, synthetic construct
  source 1..20: mol_type = other RNA
agacaccaaatactctataa

SEQ ID NO: 5138 - RNA, 20 nt, synthetic construct
  source 1..20: mol_type = other RNA
agacacatccagcgataacc

SEQ ID NO: 5139 - RNA, 20 nt, synthetic construct
  source 1..20: mol_type = other RNA
agacacacggtagttccccc

SEQ ID NO: 5140 - RNA, 21 nt, synthetic construct
  source 1..21: mol_type = other RNA
agacaagaaatgtgaaaccac

SEQ ID NO: 5141 - RNA, 20 nt, synthetic construct
  source 1..20: mol_type = other RNA
agacaagaaatgtgaaacca

SEQ ID NO: 5142 - RNA, 21 nt, synthetic construct
  source 1..21: mol_type = other RNA
agacaaaagaaaattggtaac

SEQ ID NO: 5143 - RNA, 20 nt, synthetic construct
  source 1..20: mol_type = other RNA
agacaaaagaaaattggtaa

SEQ ID NO: 5144 - RNA, 20 nt, synthetic construct
  source 1..20: mol_type = other RNA
agaatcctcacaataccgca

SEQ ID NO: 5145 - RNA, 20 nt, synthetic construct
  source 1..20: mol_type = other RNA
agaagtcagaaggcaaaaac

SEQ ID NO: 5146 - RNA, 20 nt, synthetic construct
  source 1..20: mol_type = other RNA
agaaggggtcctaggaatcc

SEQ ID NO: 5147 - RNA, 20 nt, synthetic construct
  source 1..20: mol_type = other RNA
agaaggggacgagagagtcc

SEQ ID NO: 5148 - RNA, 20 nt, synthetic construct
  source 1..20: mol_type = other RNA
agaagattgacgataaggga

SEQ ID NO: 5149 - RNA, 20 nt, synthetic construct
  source 1..20: mol_type = other RNA
agaagatgaggcatagcagc

SEQ ID NO: 5150 - RNA, 20 nt, synthetic construct
  source 1..20: mol_type = other RNA
agaagatctcgtactgaagg

SEQ ID NO: 5151 - RNA, 20 nt, synthetic construct
  source 1..20: mol_type = other RNA
agaagaactccctcgcctcg

SEQ ID NO: 5152 - RNA, 20 nt, synthetic construct
  source 1..20: mol_type = other RNA
agaagaaccaacaagaagat

SEQ ID NO: 5153 - RNA, 20 nt, synthetic construct
  source 1..20: mol_type = other RNA
agaacatcacatcaggattc

SEQ ID NO: 5154 - RNA, 20 nt, synthetic construct
  source 1..20: mol_type = other RNA
agaaaggccttgtaagttgg

SEQ ID NO: 5155 - RNA, 20 nt, synthetic construct
  source 1..20: mol_type = other RNA
agaaaccgttatagagtatt

SEQ ID NO: 5156 - RNA, 20 nt, synthetic construct
  source 1..20: mol_type = other RNA
agaaaattggtaacagcggt

SEQ ID NO: 5157 - RNA, 20 nt, synthetic construct
  source 1..20: mol_type = other RNA
actttctcgccaacttacaa

SEQ ID NO: 5158 - RNA, 20 nt, synthetic construct
  source 1..20: mol_type = other RNA
acttctctcaattttctagg

SEQ ID NO: 5159 - RNA, 20 nt, synthetic construct
  source 1..20: mol_type = other RNA
acttccaatgacataaccca

SEQ ID NO: 5160 - RNA, 20 nt, synthetic construct
  source 1..20: mol_type = other RNA
acttcaaagactgtttgttt

SEQ ID NO: 5161 - RNA, 20 nt, synthetic construct
  source 1..20: mol_type = other RNA
acttacagttaatgagaaaa

SEQ ID NO: 5162 - RNA, 20 nt, synthetic construct
  source 1..20: mol_type = other RNA
acttacaaggcctttctgtg

SEQ ID NO: 5163 - RNA, 21 nt, synthetic construct
  source 1..21: mol_type = other RNA
actgtttgtttaaagactggg

SEQ ID NO: 5164 - RNA, 20 nt, synthetic construct
  source 1..20: mol_type = other RNA
actgtttgtttaaagactgg

SEQ ID NO: 5165 - RNA, 20 nt, synthetic construct
  source 1..20: mol_type = other RNA
actgttgttagacgacgagg

SEQ ID NO: 5166 - RNA, 20 nt, synthetic construct
  source 1..20: mol_type = other RNA
actgggaggagttgggggag

SEQ ID NO: 5167 - RNA, 20 nt, synthetic construct
  source 1..20: mol_type = other RNA
actggctggggcttggtcat

SEQ ID NO: 5168 - RNA, 20 nt, synthetic construct
  source 1..20: mol_type = other RNA
actgaaggaaagaagtcaga

SEQ ID NO: 5169 - RNA, 20 nt, synthetic construct
  source 1..20: mol_type = other RNA
actgaacaaatggcactagt

SEQ ID NO: 5170 - RNA, 20 nt, synthetic construct
  source 1..20: mol_type = other RNA
actgaaagccaaacagtggg

SEQ ID NO: 5171 - RNA, 20 nt, synthetic construct
  source 1..20: mol_type = other RNA
actctgttgtcctctcccgc

SEQ ID NO: 5172 - RNA, 20 nt, synthetic construct
  source 1..20: mol_type = other RNA
actctgcaagatcccagagt

SEQ ID NO: 5173 - RNA, 21 nt, synthetic construct
  source 1..21: mol_type = other RNA
actctagctacctgggtgggt

SEQ ID NO: 5174 - RNA, 20 nt, synthetic construct
  source 1..20: mol_type = other RNA
actctaaggcttcccgatac

SEQ ID NO: 5175 - RNA, 20 nt, synthetic construct
  source 1..20: mol_type = other RNA
actcctcccagtctttaaac

SEQ ID NO: 5176 - RNA, 21 nt, synthetic construct
  source 1..21: mol_type = other RNA
actcctccagcttatagacca

SEQ ID NO: 5177 - RNA, 20 nt, synthetic construct
  source 1..20: mol_type = other RNA
actccctcgcctcgcagacg

SEQ ID NO: 5178 - RNA, 20 nt, synthetic construct
  source 1..20: mol_type = other RNA
actcccataggaattttccg

SEQ ID NO: 5179 - RNA, 21 nt, synthetic construct
  source 1..21: mol_type = other RNA
actcataaggtggggaacttt

SEQ ID NO: 5180 - RNA, 20 nt, synthetic construct
  source 1..20: mol_type = other RNA
actatttacacactctatgg

SEQ ID NO: 5181 - RNA, 20 nt, synthetic construct
  source 1..20: mol_type = other RNA
actagtaaactgagccagga

SEQ ID NO: 5182 - RNA, 21 nt, synthetic construct
  source 1..21: mol_type = other RNA
actaggaggctgtaggcataa

SEQ ID NO: 5183 - RNA, 20 nt, synthetic construct
  source 1..20: mol_type = other RNA
actagatgttctggataata

SEQ ID NO: 5184 - RNA, 20 nt, synthetic construct
  source 1..20: mol_type = other RNA
actactgttgttagacgacg

SEQ ID NO: 5185 - RNA, 20 nt, synthetic construct
  source 1..20: mol_type = other RNA
actactaggtctctagatgc

SEQ ID NO: 5186 - RNA, 20 nt, synthetic construct
  source 1..20: mol_type = other RNA
actaccgtgtgtcttggcca

SEQ ID NO: 5187 - RNA, 20 nt, synthetic construct
  source 1..20: mol_type = other RNA
actaatgactctagctacct

SEQ ID NO: 5188 - RNA, 20 nt, synthetic construct
  source 1..20: mol_type = other RNA
actaatatgggcctaaagtt

SEQ ID NO: 5189 - RNA, 20 nt, synthetic construct
  source 1..20: mol_type = other RNA
acgtcgcatggagaccaccg

SEQ ID NO: 5190 - RNA, 20 nt, synthetic construct
  source 1..20: mol_type = other RNA
acggtttctcttccaaaagt

SEQ ID NO: 5191 - RNA, 20 nt, synthetic construct
  source 1..20: mol_type = other RNA
acggtggtctccatgcgacg

SEQ ID NO: 5192 - RNA, 20 nt, synthetic construct
  source 1..20: mol_type = other RNA
acggggcgcacctctcttta

SEQ ID NO: 5193 - RNA, 20 nt, synthetic construct
  source 1..20: mol_type = other RNA
acggggagtccgcgtaaaga

SEQ ID NO: 5194 - RNA, 20 nt, synthetic construct
  source 1..20: mol_type = other RNA
acgggctgaggcccactccc

SEQ ID NO: 5195 - RNA, 20 nt, synthetic construct
  source 1..20: mol_type = other RNA
acggcagacggagaagggga

SEQ ID NO: 5196 - RNA, 20 nt, synthetic construct
  source 1..20: mol_type = other RNA
acggaggccttttggggtgg

SEQ ID NO: 5197 - RNA, 20 nt, synthetic construct
  source 1..20: mol_type = other RNA
acgcgctgatggcccatgac

SEQ ID NO: 5198 - RNA, 20 nt, synthetic construct
  source 1..20: mol_type = other RNA
acgcccaccgaatgttgccc

SEQ ID NO: 5199 - RNA, 20 nt, synthetic construct
  source 1..20: mol_type = other RNA
acgcacgcgctgatggccca

SEQ ID NO: 5200 - RNA, 20 nt, synthetic construct
  source 1..20: mol_type = other RNA
acgcaacccccactggctgg

SEQ ID NO: 5201 - RNA, 20 nt, synthetic construct
  source 1..20: mol_type = other RNA
acgatgtatatttgcgggag

SEQ ID NO: 5202 - RNA, 20 nt, synthetic construct
  source 1..20: mol_type = other RNA
acgaggcaggtcccctagaa

SEQ ID NO: 5203 - RNA, 21 nt, synthetic construct
  source 1..21: mol_type = other RNA
acgagaaggggtcctaggaat

SEQ ID NO: 5204 - RNA, 20 nt, synthetic construct
  source 1..20: mol_type = other RNA
acgacgaggcaggtccccta

SEQ ID NO: 5205 - RNA, 20 nt, synthetic construct
  source 1..20: mol_type = other RNA
acctttggataaaacctagc

SEQ ID NO: 5206 - RNA, 20 nt, synthetic construct
  source 1..20: mol_type = other RNA
acctttcaccaaactctgca

SEQ ID NO: 5207 - RNA, 20 nt, synthetic construct
  source 1..20: mol_type = other RNA
acctttaccccgttgcccgg

SEQ ID NO: 5208 - RNA, 20 nt, synthetic construct
  source 1..20: mol_type = other RNA
accttgggcaacattcggtg

SEQ ID NO: 5209 - RNA, 20 nt, synthetic construct
  source 1..20: mol_type = other RNA
accttcgtctgcgaggcgag

SEQ ID NO: 5210 - RNA, 20 nt, synthetic construct
  source 1..20: mol_type = other RNA
accttattatccagaacatc

SEQ ID NO: 5211 - RNA, 20 nt, synthetic construct
  source 1..20: mol_type = other RNA
acctgtctttaatcctcatt

SEQ ID NO: 5212 - RNA, 21 nt, synthetic construct
  source 1..21: mol_type = other RNA
acctgggtgggtgttaatttg

SEQ ID NO: 5213 - RNA, 20 nt, synthetic construct
  source 1..20: mol_type = other RNA
acctgggtgggtgttaattt

SEQ ID NO: 5214 - RNA, 20 nt, synthetic construct
  source 1..20: mol_type = other RNA
acctggccgttgccgggcaa

SEQ ID NO: 5215 - RNA, 20 nt, synthetic construct
  source 1..20: mol_type = other RNA
acctgcatgactactgctca

SEQ ID NO: 5216 - RNA, 21 nt, synthetic construct
  source 1..21: mol_type = other RNA
acctcctgtcctccaacttgt

SEQ ID NO: 5217 - RNA, 20 nt, synthetic construct
  source 1..20: mol_type = other RNA
acctcaccatactgcactca

SEQ ID NO: 5218 - RNA, 20 nt, synthetic construct
  source 1..20: mol_type = other RNA
acctcaatgttagtattcct

SEQ ID NO: 5219 - RNA, 20 nt, synthetic construct
  source 1..20: mol_type = other RNA
acctagcaggcataatcaat

SEQ ID NO: 5220 - RNA, 20 nt, synthetic construct
  source 1..20: mol_type = other RNA
accgcctcagctctgtatcg

SEQ ID NO: 5221 - RNA, 20 nt, synthetic construct
  source 1..20: mol_type = other RNA
accgaccttgaggcatactt

SEQ ID NO: 5222 - RNA, 20 nt, synthetic construct
  source 1..20: mol_type = other RNA
acccttctcggggtcgcttg

SEQ ID NO: 5223 - RNA, 21 nt, synthetic construct
  source 1..21: mol_type = other RNA
acccttatccaatggtaaata

SEQ ID NO: 5224 - RNA, 20 nt, synthetic construct
  source 1..20: mol_type = other RNA
accctaacaaaacaaagaga

SEQ ID NO: 5225 - RNA, 20 nt, synthetic construct
  source 1..20: mol_type = other RNA
accccttctcgtgttacagg

SEQ ID NO: 5226 - RNA, 20 nt, synthetic construct
  source 1..20: mol_type = other RNA
accccgctgtctccaccttt

SEQ ID NO: 5227 - RNA, 20 nt, synthetic construct
  source 1..20: mol_type = other RNA
accccgcctgtaacacgaga

SEQ ID NO: 5228 - RNA, 20 nt, synthetic construct
  source 1..20: mol_type = other RNA
accccgagaagggtcgtccg

SEQ ID NO: 5229 - RNA, 20 nt, synthetic construct
  source 1..20: mol_type = other RNA
acccataacttccaatgaca

SEQ ID NO: 5230 - RNA, 20 nt, synthetic construct
  source 1..20: mol_type = other RNA
acccaggtagctagagtcat

SEQ ID NO: 5231 - RNA, 20 nt, synthetic construct
  source 1..20: mol_type = other RNA
acccaaagacaaaagaaaat

SEQ ID NO: 5232 - RNA, 20 nt, synthetic construct
  source 1..20: mol_type = other RNA
accagttggatccagccttc

SEQ ID NO: 5233 - RNA, 21 nt, synthetic construct
  source 1..21: mol_type = other RNA
accagtaaagttccccacctt

SEQ ID NO: 5234 - RNA, 20 nt, synthetic construct
  source 1..20: mol_type = other RNA
accacattgtgtaaatgggg

SEQ ID NO: 5235 - RNA, 20 nt, synthetic construct
  source 1..20: mol_type = other RNA
accacatcatccatataact

SEQ ID NO: 5236 - RNA, 20 nt, synthetic construct
  source 1..20: mol_type = other RNA
accaattttcttttgtcttt

SEQ ID NO: 5237 - RNA, 20 nt, synthetic construct
  source 1..20: mol_type = other RNA
accaacaagaagatgaggca

SEQ ID NO: 5238 - RNA, 20 nt, synthetic construct
  source 1..20: mol_type = other RNA
accaaatgcccctatcctat

SEQ ID NO: 5239 - RNA, 21 nt, synthetic construct
  source 1..21: mol_type = other RNA
accaaatatttaccattggat

SEQ ID NO: 5240 - RNA, 20 nt, synthetic construct
  source 1..20: mol_type = other RNA
accaaatatttaccattgga

SEQ ID NO: 5241 - RNA, 20 nt, synthetic construct
  source 1..20: mol_type = other RNA
accaaactctgcaagatccc

SEQ ID NO: 5242 - RNA, 20 nt, synthetic construct
  source 1..20: mol_type = other RNA
acatttcttgtctcactttt

SEQ ID NO: 5243 - RNA, 20 nt, synthetic construct
  source 1..20: mol_type = other RNA
acatttaaaccctaacaaaa

SEQ ID NO: 5244 - RNA, 20 nt, synthetic construct
  source 1..20: mol_type = other RNA
acattgtgtaaatggggcag

SEQ ID NO: 5245 - RNA, 20 nt, synthetic construct
  source 1..20: mol_type = other RNA
acattgaggttcccgagatt

SEQ ID NO: 5246 - RNA, 20 nt, synthetic construct
  source 1..20: mol_type = other RNA
acattctttgattttttgta

SEQ ID NO: 5247 - RNA, 20 nt, synthetic construct
  source 1..20: mol_type = other RNA
acattatcaaaaaatgtgaa

SEQ ID NO: 5248 - RNA, 20 nt, synthetic construct
  source 1..20: mol_type = other RNA
acatggagaacatcacatca

SEQ ID NO: 5249 - RNA, 20 nt, synthetic construct
  source 1..20: mol_type = other RNA
acatgaacaagagatgatta

SEQ ID NO: 5250 - RNA, 20 nt, synthetic construct
  source 1..20: mol_type = other RNA
acatcgtatccatggctgct

SEQ ID NO: 5251 - RNA, 20 nt, synthetic construct
  source 1..20: mol_type = other RNA
acatccagcgataaccagga

SEQ ID NO: 5252 - RNA, 20 nt, synthetic construct
  source 1..20: mol_type = other RNA
acatcatccatataactgaa

SEQ ID NO: 5253 - RNA, 20 nt, synthetic construct
  source 1..20: mol_type = other RNA
acatcatacaaaaaatcaaa

SEQ ID NO: 5254 - RNA, 20 nt, synthetic construct
  source 1..20: mol_type = other RNA
acatcacatcaggattccta

SEQ ID NO: 5255 - RNA, 20 nt, synthetic construct
  source 1..20: mol_type = other RNA
acataccttgatagtccaga

SEQ ID NO: 5256 - RNA, 21 nt, synthetic construct
  source 1..21: mol_type = other RNA
acataactgactactaggtct

SEQ ID NO: 5257 - RNA, 20 nt, synthetic construct
  source 1..20: mol_type = other RNA
acataacccataaaattcag

SEQ ID NO: 5258 - RNA, 20 nt, synthetic construct
  source 1..20: mol_type = other RNA
acagtttgtaggcccactta

SEQ ID NO: 5259 - RNA, 20 nt, synthetic construct
  source 1..20: mol_type = other RNA
acagtgggggaaagccctac

SEQ ID NO: 5260 - RNA, 20 nt, synthetic construct
  source 1..20: mol_type = other RNA
acagtctttgaagtatgcct

SEQ ID NO: 5261 - RNA, 20 nt, synthetic construct
  source 1..20: mol_type = other RNA
acagtagtttccggaagtgt

SEQ ID NO: 5262 - RNA, 20 nt, synthetic construct
  source 1..20: mol_type = other RNA
acaggtgcaatttccgtccg

SEQ ID NO: 5263 - RNA, 20 nt, synthetic construct
  source 1..20: mol_type = other RNA
acaggtacagtagaagaata

SEQ ID NO: 5264 - RNA, 21 nt, synthetic construct
  source 1..21: mol_type = other RNA
acaggaggttggtgagtgatt

SEQ ID NO: 5265 - RNA, 20 nt, synthetic construct
  source 1..20: mol_type = other RNA
acaggaggttggtgagtgat

SEQ ID NO: 5266 - RNA, 20 nt, synthetic construct
  source 1..20: mol_type = other RNA
acagcttggaggcttgaaca

SEQ ID NO: 5267 - RNA, 20 nt, synthetic construct
  source 1..20: mol_type = other RNA
acagcggtaaaaagggactc

SEQ ID NO: 5268 - RNA, 21 nt, synthetic construct
  source 1..21: mol_type = other RNA
acagcaacaggagggatacat

SEQ ID NO: 5269 - RNA, 20 nt, synthetic construct
  source 1..20: mol_type = other RNA
acagcaacaggagggataca

SEQ ID NO: 5270 - RNA, 21 nt, synthetic construct
  source 1..21: mol_type = other RNA
acagcaaatccagattgggac

SEQ ID NO: 5271 - RNA, 21 nt, synthetic construct
  source 1..21: mol_type = other RNA
acagagctgaggcggtatcta

SEQ ID NO: 5272 - RNA, 20 nt, synthetic construct
  source 1..20: mol_type = other RNA
acagagctgaggcggtatct

SEQ ID NO: 5273 - RNA, 20 nt, synthetic construct
  source 1..20: mol_type = other RNA
acagacggggagtccgcgta

SEQ ID NO: 5274 - RNA, 20 nt, synthetic construct
  source 1..20: mol_type = other RNA
acagaaaggccttgtaagtt

SEQ ID NO: 5275 - RNA, 20 nt, synthetic construct
  source 1..20: mol_type = other RNA
acactcatcctcaggccatg

SEQ ID NO: 5276 - RNA, 20 nt, synthetic construct
  source 1..20: mol_type = other RNA
acactatttacacactctat

SEQ ID NO: 5277 - RNA, 20 nt, synthetic construct
  source 1..20: mol_type = other RNA
acacggtccggcagatgaga

SEQ ID NO: 5278 - RNA, 20 nt, synthetic construct
  source 1..20: mol_type = other RNA
acacggtagttccccctaga

SEQ ID NO: 5279 - RNA, 20 nt, synthetic construct
  source 1..20: mol_type = other RNA
acacctggccagacgccaac

SEQ ID NO: 5280 - RNA, 20 nt, synthetic construct
  source 1..20: mol_type = other RNA
acacatcatacaaaaaatca

SEQ ID NO: 5281 - RNA, 20 nt, synthetic construct
  source 1..20: mol_type = other RNA
acacatagcgcctcattttg

SEQ ID NO: 5282 - RNA, 20 nt, synthetic construct
  source 1..20: mol_type = other RNA
acacacggtagttcccccta

SEQ ID NO: 5283 - RNA, 20 nt, synthetic construct
  source 1..20: mol_type = other RNA
acaatgtggttatcctgcgt

SEQ ID NO: 5284 - RNA, 20 nt, synthetic construct
  source 1..20: mol_type = other RNA
acaatgctcaggagactcta

SEQ ID NO: 5285 - RNA, 20 nt, synthetic construct
  source 1..20: mol_type = other RNA
acaagggcattaacgcagga

SEQ ID NO: 5286 - RNA, 20 nt, synthetic construct
  source 1..20: mol_type = other RNA
acaaggcctttctgtgtaaa

SEQ ID NO: 5287 - RNA, 20 nt, synthetic construct
  source 1..20: mol_type = other RNA
acaagcggctaggagttccg

SEQ ID NO: 5288 - RNA, 20 nt, synthetic construct
  source 1..20: mol_type = other RNA
acaagagttgcctgaacttt

SEQ ID NO: 5289 - RNA, 21 nt, synthetic construct
  source 1..21: mol_type = other RNA
acaagaatcctcacaataccg

SEQ ID NO: 5290 - RNA, 20 nt, synthetic construct
  source 1..20: mol_type = other RNA
acaagaagatgaggcatagc

SEQ ID NO: 5291 - RNA, 20 nt, synthetic construct
  source 1..20: mol_type = other RNA
acaagaacacatcatacaaa

SEQ ID NO: 5292 - RNA, 20 nt, synthetic construct
  source 1..20: mol_type = other RNA
acaagaaatgtgaaaccaca

SEQ ID NO: 5293 - RNA, 21 nt, synthetic construct
  source 1..21: mol_type = other RNA
acaacctttcaccaaactctg

SEQ ID NO: 5294 - RNA, 21 nt, synthetic construct
  source 1..21: mol_type = other RNA
acaacagtagtttccggaagt

SEQ ID NO: 5295 - RNA, 20 nt, synthetic construct
  source 1..20: mol_type = other RNA
acaaatggcactagtaaact

SEQ ID NO: 5296 - RNA, 21 nt, synthetic construct
  source 1..21: mol_type = other RNA
acaaagagatggggttactct

SEQ ID NO: 5297 - RNA, 20 nt, synthetic construct
  source 1..20: mol_type = other RNA
acaaactttgccagcaaatc

SEQ ID NO: 5298 - RNA, 20 nt, synthetic construct
  source 1..20: mol_type = other RNA
aattttccgaaagcccagga

SEQ ID NO: 5299 - RNA, 21 nt, synthetic construct
  source 1..21: mol_type = other RNA
aattttatgggttatgtcatt

SEQ ID NO: 5300 - RNA, 20 nt, synthetic construct
  source 1..20: mol_type = other RNA
aattttatgggttatgtcat

SEQ ID NO: 5301 - RNA, 20 nt, synthetic construct
  source 1..20: mol_type = other RNA
aatttggaagatccagcatc

SEQ ID NO: 5302 - RNA, 20 nt, synthetic construct
  source 1..20: mol_type = other RNA
aatttatgcctacagcctcc

SEQ ID NO: 5303 - RNA, 20 nt, synthetic construct
  source 1..20: mol_type = other RNA
aattggtaacagcggtaaaa

SEQ ID NO: 5304 - RNA, 20 nt, synthetic construct
  source 1..20: mol_type = other RNA
aattgagagaagtccaccac

SEQ ID NO: 5305 - RNA, 20 nt, synthetic construct
  source 1..20: mol_type = other RNA
aattctttgctggggggaac

SEQ ID NO: 5306 - RNA, 21 nt, synthetic construct
  source 1..21: mol_type = other RNA
aattcgttgacatactttcca

SEQ ID NO: 5307 - RNA, 20 nt, synthetic construct
  source 1..20: mol_type = other RNA
aattcgcagtccccaacctc

SEQ ID NO: 5308 - RNA, 20 nt, synthetic construct
  source 1..20: mol_type = other RNA
aatgtttgctccagacctgc

SEQ ID NO: 5309 - RNA, 20 nt, synthetic construct
  source 1..20: mol_type = other RNA
aatgtcaacgaccgaccttg

SEQ ID NO: 5310 - RNA, 21 nt, synthetic construct
  source 1..21: mol_type = other RNA
aatgtatacccaaagacaaaa

SEQ ID NO: 5311 - RNA, 20 nt, synthetic construct
  source 1..20: mol_type = other RNA
aatgtatacccaaagacaaa

SEQ ID NO: 5312 - RNA, 20 nt, synthetic construct
  source 1..20: mol_type = other RNA
aatggggcagcaaaacccaa

SEQ ID NO: 5313 - RNA, 20 nt, synthetic construct
  source 1..20: mol_type = other RNA
aatggcactagtaaactgag

SEQ ID NO: 5314 - RNA, 21 nt, synthetic construct
  source 1..21: mol_type = other RNA
aatgattaactagatgttctg

SEQ ID NO: 5315 - RNA, 20 nt, synthetic construct
  source 1..20: mol_type = other RNA
aatgattaactagatgttct

SEQ ID NO: 5316 - RNA, 20 nt, synthetic construct
  source 1..20: mol_type = other RNA
aatgactctagctacctggg

SEQ ID NO: 5317 - RNA, 21 nt, synthetic construct
  source 1..21: mol_type = other RNA
aatcttcttttctcattaact

SEQ ID NO: 5318 - RNA, 20 nt, synthetic construct
  source 1..20: mol_type = other RNA
aatctcgggaacctcaatgt

SEQ ID NO: 5319 - RNA, 21 nt, synthetic construct
  source 1..21: mol_type = other RNA
aatcgccgcgtcgcagaagat

SEQ ID NO: 5320 - RNA, 21 nt, synthetic construct
  source 1..21: mol_type = other RNA
aatcctgcggacgacccttct

SEQ ID NO: 5321 - RNA, 20 nt, synthetic construct
  source 1..20: mol_type = other RNA
aatcctctgggattctttcc

SEQ ID NO: 5322 - RNA, 20 nt, synthetic construct
  source 1..20: mol_type = other RNA
aatccgcctcctgcctccac

SEQ ID NO: 5323 - RNA, 20 nt, synthetic construct
  source 1..20: mol_type = other RNA
aatcccagaggattgctggt

SEQ ID NO: 5324 - RNA, 20 nt, synthetic construct
  source 1..20: mol_type = other RNA
aatcaataggcctgttaata

SEQ ID NO: 5325 - RNA, 20 nt, synthetic construct
  source 1..20: mol_type = other RNA
aatatttggtaacctttgga

SEQ ID NO: 5326 - RNA, 20 nt, synthetic construct
  source 1..20: mol_type = other RNA
aatatggtgacccacaaaat

SEQ ID NO: 5327 - RNA, 21 nt, synthetic construct
  source 1..21: mol_type = other RNA
aatagtgtctagtttggaagt

SEQ ID NO: 5328 - RNA, 20 nt, synthetic construct
  source 1..20: mol_type = other RNA
aatagtgtctagtttggaag

SEQ ID NO: 5329 - RNA, 20 nt, synthetic construct
  source 1..20: mol_type = other RNA
aatactaacattgaggttcc

SEQ ID NO: 5330 - RNA, 20 nt, synthetic construct
  source 1..20: mol_type = other RNA
aatacaggcctctcactctg

SEQ ID NO: 5331 - RNA, 20 nt, synthetic construct
  source 1..20: mol_type = other RNA
aagttttctaaaacattctt

SEQ ID NO: 5332 - RNA, 21 nt, synthetic construct
  source 1..21: mol_type = other RNA
aagttggaggacaggaggttg

SEQ ID NO: 5333 - RNA, 20 nt, synthetic construct
  source 1..20: mol_type = other RNA
aagttatgggtccttgccac

SEQ ID NO: 5334 - RNA, 20 nt, synthetic construct
  source 1..20: mol_type = other RNA
aagtgaaagcctgcttagat

SEQ ID NO: 5335 - RNA, 20 nt, synthetic construct
  source 1..20: mol_type = other RNA
aagtcagaaggcaaaaacga

SEQ ID NO: 5336 - RNA, 21 nt, synthetic construct
  source 1..21: mol_type = other RNA
aaggtttggtacagcaacagg

SEQ ID NO: 5337 - RNA, 20 nt, synthetic construct
  source 1..20: mol_type = other RNA
aaggtttggtacagcaacag

SEQ ID NO: 5338 - RNA, 21 nt, synthetic construct
  source 1..21: mol_type = other RNA
aaggttaccaaatatttacca

SEQ ID NO: 5339 - RNA, 20 nt, synthetic construct
  source 1..20: mol_type = other RNA
aaggtggagacagcggggta

SEQ ID NO: 5340 - RNA, 20 nt, synthetic construct
  source 1..20: mol_type = other RNA
aaggtcggtcgttgacattg

SEQ ID NO: 5341 - RNA, 20 nt, synthetic construct
  source 1..20: mol_type = other RNA
aaggtaggagctggagcatt

SEQ ID NO: 5342 - RNA, 20 nt, synthetic construct
  source 1..20: mol_type = other RNA
aagggtcgtccgcaggattc

SEQ ID NO: 5343 - RNA, 20 nt, synthetic construct
  source 1..20: mol_type = other RNA
aagggtcgatgtccatgccc

SEQ ID NO: 5344 - RNA, 21 nt, synthetic construct
  source 1..21: mol_type = other RNA
aaggggtcctaggaatcctga

SEQ ID NO: 5345 - RNA, 20 nt, synthetic construct
  source 1..20: mol_type = other RNA
aaggggacgagagagtccca

SEQ ID NO: 5346 - RNA, 20 nt, synthetic construct
  source 1..20: mol_type = other RNA
aagggactcaagatgctgta

SEQ ID NO: 5347 - RNA, 20 nt, synthetic construct
  source 1..20: mol_type = other RNA
aaggcttcccgatacagagc

SEQ ID NO: 5348 - RNA, 20 nt, synthetic construct
  source 1..20: mol_type = other RNA
aaggcgggtatattatataa

SEQ ID NO: 5349 - RNA, 20 nt, synthetic construct
  source 1..20: mol_type = other RNA
aaggccttgtaagttggcga

SEQ ID NO: 5350 - RNA, 20 nt, synthetic construct
  source 1..20: mol_type = other RNA
aaggcctccgtgcggtgggg

SEQ ID NO: 5351 - RNA, 20 nt, synthetic construct
  source 1..20: mol_type = other RNA
aaggcacagcttggaggctt

SEQ ID NO: 5352 - RNA, 20 nt, synthetic construct
  source 1..20: mol_type = other RNA
aaggacacctggccagacgc

SEQ ID NO: 5353 - RNA, 20 nt, synthetic construct
  source 1..20: mol_type = other RNA
aaggaaagaagtcagaaggc

SEQ ID NO: 5354 - RNA, 21 nt, synthetic construct
  source 1..21: mol_type = other RNA
aagcgaagtgcacacggtccg

SEQ ID NO: 5355 - RNA, 20 nt, synthetic construct
  source 1..20: mol_type = other RNA
aagcgaagtgcacacggtcc

SEQ ID NO: 5356 - RNA, 20 nt, synthetic construct
  source 1..20: mol_type = other RNA
aagcctccaagctgtgcctt

SEQ ID NO: 5357 - RNA, 20 nt, synthetic construct
  source 1..20: mol_type = other RNA
aagccctacgaaccactgaa

SEQ ID NO: 5358 - RNA, 20 nt, synthetic construct
  source 1..20: mol_type = other RNA
aagccccagccagtgggggt

SEQ ID NO: 5359 - RNA, 20 nt, synthetic construct
  source 1..20: mol_type = other RNA
aagcaattctttgctggggg

SEQ ID NO: 5360 - RNA, 20 nt, synthetic construct
  source 1..20: mol_type = other RNA
aagattgacgataagggaga

SEQ ID NO: 5361 - RNA, 20 nt, synthetic construct
  source 1..20: mol_type = other RNA
aagattctgccccatgctgt

SEQ ID NO: 5362 - RNA, 20 nt, synthetic construct
  source 1..20: mol_type = other RNA
aagatggtgttttccaatga

SEQ ID NO: 5363 - RNA, 20 nt, synthetic construct
  source 1..20: mol_type = other RNA
aagatctcgtactgaaggaa

SEQ ID NO: 5364 - RNA, 20 nt, synthetic construct
  source 1..20: mol_type = other RNA
aagatctacagcatggggca

SEQ ID NO: 5365 - RNA, 20 nt, synthetic construct
  source 1..20: mol_type = other RNA
aagaggactcttggactctc

SEQ ID NO: 5366 - RNA, 20 nt, synthetic construct
  source 1..20: mol_type = other RNA
aagagatggggttactctct

SEQ ID NO: 5367 - RNA, 20 nt, synthetic construct
  source 1..20: mol_type = other RNA
aagagatgattaggcagagg

SEQ ID NO: 5368 - RNA, 20 nt, synthetic construct
  source 1..20: mol_type = other RNA
aagagagaaacaacacatag

SEQ ID NO: 5369 - RNA, 21 nt, synthetic construct
  source 1..21: mol_type = other RNA
aagagaaaccgttatagagta

SEQ ID NO: 5370 - RNA, 20 nt, synthetic construct
  source 1..20: mol_type = other RNA
aagactgtttgtttaaagac

SEQ ID NO: 5371 - RNA, 20 nt, synthetic construct
  source 1..20: mol_type = other RNA
aagactgggaggagttgggg

SEQ ID NO: 5372 - RNA, 21 nt, synthetic construct
  source 1..21: mol_type = other RNA
aagacattatcaaaaaatgtg

SEQ ID NO: 5373 - RNA, 20 nt, synthetic construct
  source 1..20: mol_type = other RNA
aagacattatcaaaaaatgt

SEQ ID NO: 5374 - RNA, 20 nt, synthetic construct
  source 1..20: mol_type = other RNA
aagaatttggagctactgtg

SEQ ID NO: 5375 - RNA, 20 nt, synthetic construct
  source 1..20: mol_type = other RNA
aagaattgcttgcctgagtg

SEQ ID NO: 5376 - RNA, 20 nt, synthetic construct
  source 1..20: mol_type = other RNA
aagaatcctcacaataccgc

SEQ ID NO: 5377 - RNA, 21 nt, synthetic construct
  source 1..21: mol_type = other RNA
aagaagtcagaaggcaaaaac

SEQ ID NO: 5378 - RNA, 20 nt, synthetic construct
  source 1..20: mol_type = other RNA
aagaagtcagaaggcaaaaa

SEQ ID NO: 5379 - RNA, 20 nt, synthetic construct
  source 1..20: mol_type = other RNA
aagaagattgcaattgatta

SEQ ID NO: 5380 - RNA, 20 nt, synthetic construct
  source 1..20: mol_type = other RNA
aagaagatgaggcatagcag

SEQ ID NO: 5381 - RNA, 20 nt, synthetic construct
  source 1..20: mol_type = other RNA
aagaaccaacaagaagatga

SEQ ID NO: 5382 - RNA, 20 nt, synthetic construct
  source 1..20: mol_type = other RNA
aagaaaattggtaacagcgg

SEQ ID NO: 5383 - RNA, 20 nt, synthetic construct
  source 1..20: mol_type = other RNA
aacttgtcctggttatcgct

SEQ ID NO: 5384 - RNA, 21 nt, synthetic construct
  source 1..21: mol_type = other RNA
aacttccaatgacataaccca

SEQ ID NO: 5385 - RNA, 20 nt, synthetic construct
  source 1..20: mol_type = other RNA
aactggagccaccagcaggg

SEQ ID NO: 5386 - RNA, 20 nt, synthetic construct
  source 1..20: mol_type = other RNA
aactgaaagccaaacagtgg

SEQ ID NO: 5387 - RNA, 20 nt, synthetic construct
  source 1..20: mol_type = other RNA
aactctgttgtcctctcccg

SEQ ID NO: 5388 - RNA, 20 nt, synthetic construct
  source 1..20: mol_type = other RNA
aactctgcaagatcccagag

SEQ ID NO: 5389 - RNA, 20 nt, synthetic construct
  source 1..20: mol_type = other RNA
aactcctcccagtctttaaa

SEQ ID NO: 5390 - RNA, 20 nt, synthetic construct
  source 1..20: mol_type = other RNA
aactccctcgcctcgcagac

SEQ ID NO: 5391 - RNA, 20 nt, synthetic construct
  source 1..20: mol_type = other RNA
aactagatgttctggataat

SEQ ID NO: 5392 - RNA, 20 nt, synthetic construct
  source 1..20: mol_type = other RNA
aactactgttgttagacgac

SEQ ID NO: 5393 - RNA, 20 nt, synthetic construct
  source 1..20: mol_type = other RNA
aactaccgtgtgtcttggcc

SEQ ID NO: 5394 - RNA, 20 nt, synthetic construct
  source 1..20: mol_type = other RNA
aactaatgactctagctacc

SEQ ID NO: 5395 - RNA, 20 nt, synthetic construct
  source 1..20: mol_type = other RNA
aacggtttctcttccaaaag

SEQ ID NO: 5396 - RNA, 20 nt, synthetic construct
  source 1..20: mol_type = other RNA
aacgccgcagacacatccag

SEQ ID NO: 5397 - RNA, 20 nt, synthetic construct
  source 1..20: mol_type = other RNA
aacgcccaccgaatgttgcc

SEQ ID NO: 5398 - RNA, 21 nt, synthetic construct
  source 1..21: mol_type = other RNA
aacgcaggataaccacattgt

SEQ ID NO: 5399 - RNA, 20 nt, synthetic construct
  source 1..20: mol_type = other RNA
aacgagagtaactccacagt

SEQ ID NO: 5400 - RNA, 20 nt, synthetic construct
  source 1..20: mol_type = other RNA
aaccttttcggctcctctgc

SEQ ID NO: 5401 - RNA, 20 nt, synthetic construct
  source 1..20: mol_type = other RNA
aacctttggataaaacctag

SEQ ID NO: 5402 - RNA, 20 nt, synthetic construct
  source 1..20: mol_type = other RNA
aacctttcaccaaactctgc

SEQ ID NO: 5403 - RNA, 20 nt, synthetic construct
  source 1..20: mol_type = other RNA
aacctgcatgactactgctc

SEQ ID NO: 5404 - RNA, 21 nt, synthetic construct
  source 1..21: mol_type = other RNA
aacctagcaggcataatcaat

SEQ ID NO: 5405 - RNA, 21 nt, synthetic construct
  source 1..21: mol_type = other RNA
aaccctaacaaaacaaagaga

SEQ ID NO: 5406 - RNA, 21 nt, synthetic construct
  source 1..21: mol_type = other RNA
aaccccgcctgtaacacgaga

SEQ ID NO: 5407 - RNA, 20 nt, synthetic construct
  source 1..20: mol_type = other RNA
aaccccgcctgtaacacgag

SEQ ID NO: 5408 - RNA, 20 nt, synthetic construct
  source 1..20: mol_type = other RNA
aacccccactggctggggct

SEQ ID NO: 5409 - RNA, 20 nt, synthetic construct
  source 1..20: mol_type = other RNA
aacccataaaattcagagag

SEQ ID NO: 5410 - RNA, 20 nt, synthetic construct
  source 1..20: mol_type = other RNA
aaccaggacaagttggagga

SEQ ID NO: 5411 - RNA, 20 nt, synthetic construct
  source 1..20: mol_type = other RNA
aaccactgaacaaatggcac

SEQ ID NO: 5412 - RNA, 20 nt, synthetic construct
  source 1..20: mol_type = other RNA
aacattgaggttcccgagat

SEQ ID NO: 5413 - RNA, 20 nt, synthetic construct
  source 1..20: mol_type = other RNA
aacatggagaacatcacatc

SEQ ID NO: 5414 - RNA, 20 nt, synthetic construct
  source 1..20: mol_type = other RNA
aacatcacatcaggattcct

SEQ ID NO: 5415 - RNA, 20 nt, synthetic construct
  source 1..20: mol_type = other RNA
aacataccttgatagtccag

SEQ ID NO: 5416 - RNA, 20 nt, synthetic construct
  source 1..20: mol_type = other RNA
aacagtgggggaaagcccta

SEQ ID NO: 5417 - RNA, 21 nt, synthetic construct
  source 1..21: mol_type = other RNA
aacagtctttgaagtatgcct

SEQ ID NO: 5418 - RNA, 21 nt, synthetic construct
  source 1..21: mol_type = other RNA
aacagtaggacatgaacaaga

SEQ ID NO: 5419 - RNA, 20 nt, synthetic construct
  source 1..20: mol_type = other RNA
aacagtaggacatgaacaag

SEQ ID NO: 5420 - RNA, 20 nt, synthetic construct
  source 1..20: mol_type = other RNA
aacagcggtaaaaagggact

SEQ ID NO: 5421 - RNA, 20 nt, synthetic construct
  source 1..20: mol_type = other RNA
aacagagttatcagtcccga

SEQ ID NO: 5422 - RNA, 20 nt, synthetic construct
  source 1..20: mol_type = other RNA
aacacgagaaggggtcctag

SEQ ID NO: 5423 - RNA, 20 nt, synthetic construct
  source 1..20: mol_type = other RNA
aacacccacccaggtagcta

SEQ ID NO: 5424 - RNA, 21 nt, synthetic construct
  source 1..21: mol_type = other RNA
aacacatcatacaaaaaatca

SEQ ID NO: 5425 - RNA, 20 nt, synthetic construct
  source 1..20: mol_type = other RNA
aacacatcatacaaaaaatc

SEQ ID NO: 5426 - RNA, 20 nt, synthetic construct
  source 1..20: mol_type = other RNA
aacacagcaaatccagattg

SEQ ID NO: 5427 - RNA, 20 nt, synthetic construct
  source 1..20: mol_type = other RNA
aacaatgctcaggagactct

SEQ ID NO: 5428 - RNA, 20 nt, synthetic construct
  source 1..20: mol_type = other RNA
aacaaggacacctggccaga

SEQ ID NO: 5429 - RNA, 20 nt, synthetic construct
  source 1..20: mol_type = other RNA
aacaagagatgattaggcag

SEQ ID NO: 5430 - RNA, 20 nt, synthetic construct
  source 1..20: mol_type = other RNA
aacaagaagatgaggcatag

SEQ ID NO: 5431 - RNA, 20 nt, synthetic construct
  source 1..20: mol_type = other RNA
aacaagaaaaaccccgcctg

SEQ ID NO: 5432 - RNA, 20 nt, synthetic construct
  source 1..20: mol_type = other RNA
aacaaatggcactagtaaac

SEQ ID NO: 5433 - RNA, 20 nt, synthetic construct
  source 1..20: mol_type = other RNA
aacaaaggacgtcccgcgca

SEQ ID NO: 5434 - RNA, 20 nt, synthetic construct
  source 1..20: mol_type = other RNA
aacaaacagtctttgaagta

SEQ ID NO: 5435 - RNA, 20 nt, synthetic construct
  source 1..20: mol_type = other RNA
aaattggtaacagcggtaaa

SEQ ID NO: 5436 - RNA, 20 nt, synthetic construct
  source 1..20: mol_type = other RNA
aaattgagagaagtccacca

SEQ ID NO: 5437 - RNA, 20 nt, synthetic construct
  source 1..20: mol_type = other RNA
aaattaacacccacccaggt

SEQ ID NO: 5438 - RNA, 20 nt, synthetic construct
  source 1..20: mol_type = other RNA
aaatgtgaaaccacaagagt

SEQ ID NO: 5439 - RNA, 20 nt, synthetic construct
  source 1..20: mol_type = other RNA
aaatgtatattaggaaaaga

SEQ ID NO: 5440 - RNA, 20 nt, synthetic construct
  source 1..20: mol_type = other RNA
aaatgtatacccaaagacaa

SEQ ID NO: 5441 - RNA, 20 nt, synthetic construct
  source 1..20: mol_type = other RNA
aaatggggcagcaaaaccca

SEQ ID NO: 5442 - RNA, 20 nt, synthetic construct
  source 1..20: mol_type = other RNA
aaatcaaagaatgttttaga

SEQ ID NO: 5443 - RNA, 20 nt, synthetic construct
  source 1..20: mol_type = other RNA
aaatatttaccattggataa

SEQ ID NO: 5444 - RNA, 20 nt, synthetic construct
  source 1..20: mol_type = other RNA
aaatacaggcctctcactct

SEQ ID NO: 5445 - RNA, 20 nt, synthetic construct
  source 1..20: mol_type = other RNA
aaagtttgtagtatgccctg

SEQ ID NO: 5446 - RNA, 20 nt, synthetic construct
  source 1..20: mol_type = other RNA
aaagttgcatggtgctggtg

SEQ ID NO: 5447 - RNA, 20 nt, synthetic construct
  source 1..20: mol_type = other RNA
aaagtgagacaagaaatgtg

SEQ ID NO: 5448 - RNA, 20 nt, synthetic construct
  source 1..20: mol_type = other RNA
aaagtatgtcaacgaattgt

SEQ ID NO: 5449 - RNA, 20 nt, synthetic construct
  source 1..20: mol_type = other RNA
aaaggtggagacagcggggt

SEQ ID NO: 5450 - RNA, 21 nt, synthetic construct
  source 1..21: mol_type = other RNA
aaaggccttgtaagttggcga

SEQ ID NO: 5451 - RNA, 20 nt, synthetic construct
  source 1..20: mol_type = other RNA
aaaggccttgtaagttggcg

SEQ ID NO: 5452 - RNA, 20 nt, synthetic construct
  source 1..20: mol_type = other RNA
aaagccaaacagtgggggaa

SEQ ID NO: 5453 - RNA, 20 nt, synthetic construct
  source 1..20: mol_type = other RNA
aaagattctgccccatgctg

SEQ ID NO: 5454 - RNA, 20 nt, synthetic construct
  source 1..20: mol_type = other RNA
aaagatggtgttttccaatg

SEQ ID NO: 5455 - RNA, 20 nt, synthetic construct
  source 1..20: mol_type = other RNA
aaagagatggggttactctc

SEQ ID NO: 5456 - RNA, 20 nt, synthetic construct
  source 1..20: mol_type = other RNA
aaagactgggaggagttggg

SEQ ID NO: 5457 - RNA, 20 nt, synthetic construct
  source 1..20: mol_type = other RNA
aaagaatttggagctactgt

SEQ ID NO: 5458 - RNA, 20 nt, synthetic construct
  source 1..20: mol_type = other RNA
aaagaatcccagaggattgc

SEQ ID NO: 5459 - RNA, 21 nt, synthetic construct
  source 1..21: mol_type = other RNA
aaacttcctattaacaggcct

SEQ ID NO: 5460 - RNA, 20 nt, synthetic construct
  source 1..20: mol_type = other RNA
aaactgttcacattttttga

SEQ ID NO: 5461 - RNA, 20 nt, synthetic construct
  source 1..20: mol_type = other RNA
aaactgagccaggagaaacg

SEQ ID NO: 5462 - RNA, 20 nt, synthetic construct
  source 1..20: mol_type = other RNA
aaactactgttgttagacga

SEQ ID NO: 5463 - RNA, 20 nt, synthetic construct
  source 1..20: mol_type = other RNA
aaacgggcaacataccttga

SEQ ID NO: 5464 - RNA, 20 nt, synthetic construct
  source 1..20: mol_type = other RNA
aaacgagagtaactccacag

SEQ ID NO: 5465 - RNA, 20 nt, synthetic construct
  source 1..20: mol_type = other RNA
aaaccccgcctgtaacacga

SEQ ID NO: 5466 - RNA, 20 nt, synthetic construct
  source 1..20: mol_type = other RNA
aaacccagcccgaatgctcc

SEQ ID NO: 5467 - RNA, 20 nt, synthetic construct
  source 1..20: mol_type = other RNA
aaacactcatcctcaggcca

SEQ ID NO: 5468 - RNA, 20 nt, synthetic construct
  source 1..20: mol_type = other RNA
aaacacagcaaatccagatt

SEQ ID NO: 5469 - RNA, 20 nt, synthetic construct
  source 1..20: mol_type = other RNA
aaacaagcggctaggagttc

SEQ ID NO: 5470 - RNA, 20 nt, synthetic construct
  source 1..20: mol_type = other RNA
aaacaaaggacgtcccgcgc

SEQ ID NO: 5471 - RNA, 20 nt, synthetic construct
  source 1..20: mol_type = other RNA
aaaattggtaacagcggtaa

SEQ ID NO: 5472 - RNA, 20 nt, synthetic construct
  source 1..20: mol_type = other RNA
aaaatcaaagaatgttttag

SEQ ID NO: 5473 - RNA, 20 nt, synthetic construct
  source 1..20: mol_type = other RNA
aaaagtgagacaagaaatgt

SEQ ID NO: 5474 - RNA, 20 nt, synthetic construct
  source 1..20: mol_type = other RNA
aaaaggttccacgcacgcgc

SEQ ID NO: 5475 - RNA, 20 nt, synthetic construct
  source 1..20: mol_type = other RNA
aaaagatggtgttttccaat

SEQ ID NO: 5476 - RNA, 20 nt, synthetic construct
  source 1..20: mol_type = other RNA
aaaacgccgcagacacatcc

SEQ ID NO: 5477 - RNA, 20 nt, synthetic construct
  source 1..20: mol_type = other RNA
aaaaccccgcctgtaacacg

SEQ ID NO: 5478 - RNA, 21 nt, synthetic construct
  source 1..21: mol_type = other RNA
aaaacattctttgattttttg

SEQ ID NO: 5479 - RNA, 21 nt, synthetic construct
  source 1..21: mol_type = other RNA
aaaacaagcggctaggagttc

SEQ ID NO: 5480 - RNA, 20 nt, synthetic construct
  source 1..20: mol_type = other RNA
aaaaatgtgaacagtttgta

SEQ ID NO: 5481 - RNA, 20 nt, synthetic construct
  source 1..20: mol_type = other RNA
aaaaatcaaagaatgtttta

SEQ ID NO: 5482 - RNA, 20 nt, synthetic construct
  source 1..20: mol_type = other RNA
aaaaagttgcatggtgctgg

SEQ ID NO: 5483 - RNA, 20 nt, synthetic construct
  source 1..20: mol_type = other RNA
aaaaaccccgcctgtaacac

SEQ ID NO: 5484 - RNA, 20 nt, synthetic construct
  source 1..20: mol_type = other RNA
aaaaaatgtgaacagtttgt

SEQ ID NO: 5485 - RNA, 20 nt, synthetic construct
  source 1..20: mol_type = other RNA
aaaaaatcaaagaatgtttt

SEQ ID NO: 5486 - RNA, 100 nt, synthetic construct
  source 1..100: mol_type = other RNA
agaaaggccttgtaagttgggttttagagctagaaatagcaagttaaaataaggctagtccgttatcaacttgaaaaagtggcaccgagtcggtgctttt

SEQ ID NO: 5487 - RNA, 100 nt, synthetic construct
  source 1..100: mol_type = other RNA
tgacgcaacccccactggctgttttagagctagaaatagcaagttaaaataaggctagtccgttatcaacttgaaaaagtggcaccgagtcggtgctttt

SEQ ID NO: 5488 - RNA, 100 nt, synthetic construct
  source 1..100: mol_type = other RNA
gcaaacacttggcacagaccgttttagagctagaaatagcaagttaaaataaggctagtccgttatcaacttgaaaaagtggcaccgagtcggtgctttt

SEQ ID NO: 5489 - RNA, 100 nt, synthetic construct
  source 1..100: mol_type = other RNA
tttgctgacgcaacccccacgttttagagctagaaatagcaagttaaaataaggctagtccgttatcaacttgaaaaagtggcaccgagtcggtgctttt

SEQ ID NO: 5490 - RNA, 100 nt, synthetic construct
  source 1..100: mol_type = other RNA
gacgcaacccccactggctggttttagagctagaaatagcaagttaaaataaggctagtccgttatcaacttgaaaaagtggcaccgagtcggtgctttt

SEQ ID NO: 5491 - RNA, 100 nt, synthetic construct
  source 1..100: mol_type = other RNA
aacccccactggctggggctgttttagagctagaaatagcaagttaaaataaggctagtccgttatcaacttgaaaaagtggcaccgagtcggtgctttt

SEQ ID NO: 5492 - RNA, 100 nt, synthetic construct
  source 1..100: mol_type = other RNA
aatgtcaacgaccgaccttggttttagagctagaaatagcaagttaaaataaggctagtccgttatcaacttgaaaaagtggcaccgagtcggtgctttt

SEQ ID NO: 5493 - RNA, 100 nt, synthetic construct
  source 1..100: mol_type = other RNA
tgcccaaggtcttacataaggttttagagctagaaatagcaagttaaaataaggctagtccgttatcaacttgaaaaagtggcaccgagtcggtgctttt

SEQ ID NO: 5494 - RNA, 100 nt, synthetic construct
  source 1..100: mol_type = other RNA
aaagaatttggagctactgtgttttagagctagaaatagcaagttaaaataaggctagtccgttatcaacttgaaaaagtggcaccgagtcggtgctttt

SEQ ID NO: 5495 - RNA, 100 nt, synthetic construct
  source 1..100: mol_type = other RNA
agagaggtgcgccccgtggtgttttagagctagaaatagcaagttaaaataaggctagtccgttatcaacttgaaaaagtggcaccgagtcggtgctttt

SEQ ID NO: 5496 - RNA, 100 nt, synthetic construct
  source 1..100: mol_type = other RNA
gaggtgaagcgaagtgcacagttttagagctagaaatagcaagttaaaataaggctagtccgttatcaacttgaaaaagtggcaccgagtcggtgctttt

SEQ ID NO: 5497 - RNA, 100 nt, synthetic construct
  source 1..100: mol_type = other RNA
ggggcgcacctctctttacggttttagagctagaaatagcaagttaaaataaggctagtccgttatcaacttgaaaaagtggcaccgagtcggtgctttt

SEQ ID NO: 5498 - RNA, 100 nt, synthetic construct
  source 1..100: mol_type = other RNA
gtgaaaaagttgcatggtgcgttttagagctagaaatagcaagttaaaataaggctagtccgttatcaacttgaaaaagtggcaccgagtcggtgctttt

SEQ ID NO: 5499 - RNA, 100 nt, synthetic construct
  source 1..100: mol_type = other RNA
gacccttataaagaatttgggttttagagctagaaatagcaagttaaaataaggctagtccgttatcaacttgaaaaagtggcaccgagtcggtgctttt

SEQ ID NO: 5500 - RNA, 100 nt, synthetic construct
  source 1..100: mol_type = other RNA
tttataagggtcgatgtccagttttagagctagaaatagcaagttaaaataaggctagtccgttatcaacttgaaaaagtggcaccgagtcggtgctttt

SEQ ID NO: 5501 - RNA, 100 nt, synthetic construct
  source 1..100: mol_type = other RNA
tggcgattggtggaggcagggttttagagctagaaatagcaagttaaaataaggctagtccgttatcaacttgaaaaagtggcaccgagtcggtgctttt

SEQ ID NO: 5502 - RNA, 100 nt, synthetic construct
  source 1..100: mol_type = other RNA
cacagaaaggccttgtaagtgttttagagctagaaatagcaagttaaaataaggctagtccgttatcaacttgaaaaagtggcaccgagtcggtgctttt

SEQ ID NO: 5503 - RNA, 100 nt, synthetic construct
  source 1..100: mol_type = other RNA
ctttctgtgtaaacaataccgttttagagctagaaatagcaagttaaaataaggctagtccgttatcaacttgaaaaagtggcaccgagtcggtgctttt

SEQ ID NO: 5504 - RNA, 100 nt, synthetic construct
  source 1..100: mol_type = other RNA
caggtattgtttacacagaagttttagagctagaaatagcaagttaaaataaggctagtccgttatcaacttgaaaaagtggcaccgagtcggtgctttt

SEQ ID NO: 5505 - RNA, 100 nt, synthetic construct
  source 1..100: mol_type = other RNA
tttaccccgttgcccggcaagttttagagctagaaatagcaagttaaaataaggctagtccgttatcaacttgaaaaagtggcaccgagtcggtgctttt

SEQ ID NO: 5506 - RNA, 100 nt, synthetic construct
  source 1..100: mol_type = other RNA
gggcaacggggtaaaggttcgttttagagctagaaatagcaagttaaaataaggctagtccgttatcaacttgaaaaagtggcaccgagtcggtgctttt

SEQ ID NO: 5507 - RNA, 100 nt, synthetic construct
  source 1..100: mol_type = other RNA
gttgcccaaggtcttacatagttttagagctagaaatagcaagttaaaataaggctagtccgttatcaacttgaaaaagtggcaccgagtcggtgctttt

SEQ ID NO: 5508 - RNA, 100 nt, synthetic construct
  source 1..100: mol_type = other RNA
tttgaagtatgcctcaaggtgttttagagctagaaatagcaagttaaaataaggctagtccgttatcaacttgaaaaagtggcaccgagtcggtgctttt

SEQ ID NO: 5509 - RNA, 100 nt, synthetic construct
  source 1..100: mol_type = other RNA
gattaaaggtctttgtactagttttagagctagaaatagcaagttaaaataaggctagtccgttatcaacttgaaaaagtggcaccgagtcggtgctttt

SEQ ID NO: 5510 - RNA, 100 nt, synthetic construct
  source 1..100: mol_type = other RNA
ttaaaggtctttgtactagggttttagagctagaaatagcaagttaaaataaggctagtccgttatcaacttgaaaaagtggcaccgagtcggtgctttt

SEQ ID NO: 5511 - RNA, 100 nt, synthetic construct
  source 1..100: mol_type = other RNA
aggaggctgtaggcataaatgttttagagctagaaatagcaagttaaaataaggctagtccgttatcaacttgaaaaagtggcaccgagtcggtgctttt

SEQ ID NO: 5512 - RNA, 100 nt, synthetic construct
  source 1..100: mol_type = other RNA
aaattgagagaagtccaccagttttagagctagaaatagcaagttaaaataaggctagtccgttatcaacttgaaaaagtggcaccgagtcggtgctttt

SEQ ID NO: 5513 - RNA, 100 nt, synthetic construct
  source 1..100: mol_type = other RNA
agaagatgaggcatagcagcgttttagagctagaaatagcaagttaaaataaggctagtccgttatcaacttgaaaaagtggcaccgagtcggtgctttt

SEQ ID NO: 5514 - RNA, 100 nt, synthetic construct
  source 1..100: mol_type = other RNA
caccacgagtctagactctggttttagagctagaaatagcaagttaaaataaggctagtccgttatcaacttgaaaaagtggcaccgagtcggtgctttt

SEQ ID NO: 5515 - RNA, 100 nt, synthetic construct
  source 1..100: mol_type = other RNA
gaagaactccctcgcctcgcgttttagagctagaaatagcaagttaaaataaggctagtccgttatcaacttgaaaaagtggcaccgagtcggtgctttt

SEQ ID NO: 5516 - RNA, 100 nt, synthetic construct
  source 1..100: mol_type = other RNA
gaagatgaggcatagcagcagttttagagctagaaatagcaagttaaaataaggctagtccgttatcaacttgaaaaagtggcaccgagtcggtgctttt

SEQ ID NO: 5517 - RNA, 100 nt, synthetic construct
  source 1..100: mol_type = other RNA
gagaagtccaccacgagtctgttttagagctagaaatagcaagttaaaataaggctagtccgttatcaacttgaaaaagtggcaccgagtcggtgctttt

SEQ ID NO: 5518 - RNA, 100 nt, synthetic construct; identical to SEQ ID NO: 5496
  source 1..100: mol_type = other RNA

SEQ ID NO: 5519 - RNA, 100 nt, synthetic construct
  source 1..100: mol_type = other RNA
tggacttctctcaattttctgttttagagctagaaatagcaagttaaaataaggctagtccgttatcaacttgaaaaagtggcaccgagtcggtgctttt

SEQ ID NO: 5520 - RNA, 117 nt, synthetic construct
  source 1..117: mol_type = other RNA
gttctgtcttttggtcaggacaaccgtctagctataagtgctgcagggtgtgagaaactcctattgctggacgatgtctcttacgaggcattagcacagcgccgacgggacgtaaac

SEQ ID NO: 5521 - RNA, 117 nt, synthetic construct
  source 1..117: mol_type = other RNA
gttctgtcttttggtcaggacaaccgtctagctataagtgctgcagggtgtgagaaactcctattgctggacgatgtctcttacgaggcattagcaccgtcagcaaacacttggcac

SEQ ID NO: 5522 - RNA, 117 nt, synthetic construct
  source 1..117: mol_type = other RNA
gttctgtcttttggtcaggacaaccgtctagctataagtgctgcagggtgtgagaaactcctattgctggacgatgtctcttacgaggcattagcacgaggacaggaggttggtgag

SEQ ID NO: 5523 - RNA, 117 nt, synthetic construct
  source 1..117: mol_type = other RNA
gttctgtcttttggtcaggacaaccgtctagctataagtgctgcagggtgtgagaaactcctattgctggacgatgtctcttacgaggcattagcacagagaagtccaccacgagtc

SEQ ID NO: 5524 - RNA, 117 nt, synthetic construct
  source 1..117: mol_type = other RNA
gttctgtcttttggtcaggacaaccgtctagctataagtgctgcagggtgtgagaaactcctattgctggacgatgtctcttacgaggcattagcactttataagggtcgatgtcca

SEQ ID NO: 5525 - RNA, 117 nt, synthetic construct
  source 1..117: mol_type = other RNA
gttctgtcttttggtcaggacaaccgtctagctataagtgctgcagggtgtgagaaactcctattgctggacgatgtctcttacgaggcattagcacaggtattgtttacacagaaa

SEQ ID NO: 5526 - RNA, 117 nt, synthetic construct
  source 1..117: mol_type = other RNA
gttctgtcttttggtcaggacaaccgtctagctataagtgctgcagggtgtgagaaactcctattgctggacgatgtctcttacgaggcattagcactttacacagaaaggccttgt

SEQ ID NO: 5527 - DNA, 20 bp, synthetic construct
  source 1..20: mol_type = other DNA
agaaaggccttgtaagttgg

SEQ ID NO: 5528 - DNA, 20 bp, synthetic construct
  source 1..20: mol_type = other DNA
tgacgcaacccccactggct

SEQ ID NO: 5529 - DNA, 20 bp, synthetic construct
  source 1..20: mol_type = other DNA
gcaaacacttggcacagacc

SEQ ID NO: 5530 - DNA, 20 bp, synthetic construct
  source 1..20: mol_type = other DNA
tttgctgacgcaacccccac

SEQ ID NO: 5531 - DNA, 20 bp, synthetic construct
  source 1..20: mol_type = other DNA
gacgcaacccccactggctg

SEQ ID NO: 5532 - DNA, 20 bp, synthetic construct
  source 1..20: mol_type = other DNA
aacccccactggctggggct

SEQ ID NO: 5533 - DNA, 20 bp, synthetic construct
  source 1..20: mol_type = other DNA
aatgtcaacgaccgaccttg

SEQ ID NO: 5534 - DNA, 20 bp, synthetic construct
  source 1..20: mol_type = other DNA
tgcccaaggtcttacataag

SEQ ID NO: 5535 - DNA, 20 bp, synthetic construct
  source 1..20: mol_type = other DNA
aaagaatttggagctactgt

SEQ ID NO: 5536 - DNA, 20 bp, synthetic construct
  source 1..20: mol_type = other DNA
agagaggtgcgccccgtggt

SEQ ID NO: 5537 - DNA, 20 bp, synthetic construct
  source 1..20: mol_type = other DNA
gaggtgaagcgaagtgcaca

SEQ ID NO: 5538 - DNA, 20 bp, synthetic construct
  source 1..20: mol_type = other DNA
ggggcgcacctctctttacg

SEQ ID NO: 5539 - DNA, 20 bp, synthetic construct
  source 1..20: mol_type = other DNA
gtgaaaaagttgcatggtgc

SEQ ID NO: 5540 - DNA, 20 bp, synthetic construct
  source 1..20: mol_type = other DNA
gacccttataaagaatttgg

SEQ ID NO: 5541 - DNA, 20 bp, synthetic construct
  source 1..20: mol_type = other DNA
tttataagggtcgatgtcca

SEQ ID NO: 5542 - DNA, 20 bp, synthetic construct
  source 1..20: mol_type = other DNA
tggcgattggtggaggcagg

SEQ ID NO: 5543 - DNA, 20 bp, synthetic construct
  source 1..20: mol_type = other DNA
cacagaaaggccttgtaagt

SEQ ID NO: 5544 - DNA, 20 bp, synthetic construct
  source 1..20: mol_type = other DNA
ctttctgtgtaaacaatacc

SEQ ID NO: 5545 - DNA, 20 bp, synthetic construct
  source 1..20: mol_type = other DNA
caggtattgtttacacagaa

SEQ ID NO: 5546 - DNA, 20 bp, synthetic construct
  source 1..20: mol_type = other DNA
tttaccccgttgcccggcaa

SEQ ID NO: 5547 - DNA, 20 bp, synthetic construct
  source 1..20: mol_type = other DNA
gggcaacggggtaaaggttc

SEQ ID NO: 5548 - DNA, 20 bp, synthetic construct
  source 1..20: mol_type = other DNA
gttgcccaaggtcttacata

SEQ ID NO: 5549 - DNA, 20 bp, synthetic construct
  source 1..20: mol_type = other DNA
tttgaagtatgcctcaaggt

SEQ ID NO: 5550 - DNA, 20 bp, synthetic construct
  source 1..20: mol_type = other DNA
gattaaaggtctttgtacta

SEQ ID NO: 5551 - DNA, 20 bp, synthetic construct
  source 1..20: mol_type = other DNA
ttaaaggtctttgtactagg

SEQ ID NO: 5552 - DNA, 20 bp, synthetic construct
  source 1..20: mol_type = other DNA
aggaggctgtaggcataaat

SEQ ID NO: 5553 - DNA, 20 bp, synthetic construct
  source 1..20: mol_type = other DNA
aaattgagagaagtccacca

SEQ ID NO: 5554 - DNA, 20 bp, synthetic construct
  source 1..20: mol_type = other DNA
agaagatgaggcatagcagc

SEQ ID NO: 5555 - DNA, 20 bp, synthetic construct
  source 1..20: mol_type = other DNA
caccacgagtctagactctg

SEQ ID NO: 5556 - DNA, 20 bp, synthetic construct
  source 1..20: mol_type = other DNA
gaagaactccctcgcctcgc

SEQ ID NO: 5557 - DNA, 20 bp, synthetic construct
  source 1..20: mol_type = other DNA
gaagatgaggcatagcagca

SEQ ID NO: 5558 - DNA, 20 bp, synthetic construct
  source 1..20: mol_type = other DNA
gagaagtccaccacgagtct

SEQ ID NO: 5559 - DNA, 20 bp, synthetic construct
  source 1..20: mol_type = other DNA
gaggtgaagcgaagtgcaca

SEQ ID NO: 5560 - DNA, 20 bp, synthetic construct
  source 1..20: mol_type = other DNA
tggacttctctcaattttct

SEQ ID NO: 5561 - DNA, 20 bp, synthetic construct
  source 1..20: mol_type = other DNA
agcgccgacgggacgtaaac

SEQ ID NO: 5562 - DNA, 20 bp, synthetic construct
  source 1..20: mol_type = other DNA
cgtcagcaaacacttggcac

SEQ ID NO: 5563 - DNA, 20 bp, synthetic construct
  source 1..20: mol_type = other DNA
gaggacaggaggttggtgag

SEQ ID NO: 5564 - DNA, 20 bp, synthetic construct
  source 1..20: mol_type = other DNA
agagaagtccaccacgagtc

SEQ ID NO: 5565 - DNA, 20 bp, synthetic construct
  source 1..20: mol_type = other DNA
tttataagggtcgatgtcca

SEQ ID NO: 5566 - DNA, 20 bp, synthetic construct
  source 1..20: mol_type = other DNA
aggtattgtttacacagaaa

SEQ ID NO: 5567 - DNA, 20 bp, synthetic construct
  source 1..20: mol_type = other DNA
tttacacagaaaggccttgt

SEQ ID NO: 5568 - RNA, 20 nt, synthetic construct
  source 1..20: mol_type = other RNA
agaaaggccttgtaagttgg

SEQ ID NO: 5569 - RNA, 20 nt, synthetic construct
  source 1..20: mol_type = other RNA
tgacgcaacccccactggct

SEQ ID NO: 5570 - RNA, 20 nt, synthetic construct
  source 1..20: mol_type = other RNA
gcaaacacttggcacagacc

SEQ ID NO: 5571 - RNA, 20 nt, synthetic construct
  source 1..20: mol_type = other RNA
tttgctgacgcaacccccac

SEQ ID NO: 5572 - RNA, 20 nt, synthetic construct
  source 1..20: mol_type = other RNA
gacgcaacccccactggctg

SEQ ID NO: 5573 - RNA, 20 nt, synthetic construct
  source 1..20: mol_type = other RNA
aacccccactggctggggct

SEQ ID NO: 5574 - RNA, 20 nt, synthetic construct
  source 1..20: mol_type = other RNA
aatgtcaacgaccgaccttg

SEQ ID NO: 5575 - RNA, 20 nt, synthetic construct
  source 1..20: mol_type = other RNA
tgcccaaggtcttacataag

SEQ ID NO: 5576 - RNA, 20 nt, synthetic construct
  source 1..20: mol_type = other RNA
aaagaatttggagctactgt

SEQ ID NO: 5577 - RNA, 20 nt, synthetic construct
  source 1..20: mol_type = other RNA
agagaggtgcgccccgtggt

SEQ ID NO: 5578 - RNA, 20 nt, synthetic construct
  source 1..20: mol_type = other RNA
gaggtgaagcgaagtgcaca

SEQ ID NO: 5579 - RNA, 20 nt, synthetic construct
  source 1..20: mol_type = other RNA
ggggcgcacctctctttacg

SEQ ID NO: 5580 - RNA, 20 nt, synthetic construct
  source 1..20: mol_type = other RNA
gtgaaaaagttgcatggtgc

SEQ ID NO: 5581 - RNA, 20 nt, synthetic construct
  source 1..20: mol_type = other RNA
gacccttataaagaatttgg

SEQ ID NO: 5582 - RNA, 20 nt, synthetic construct
  source 1..20: mol_type = other RNA
tttataagggtcgatgtcca

SEQ ID NO: 5583 - RNA, 20 nt, synthetic construct
  source 1..20: mol_type = other RNA
tggcgattggtggaggcagg

SEQ ID NO: 5584 - RNA, 20 nt, synthetic construct
  source 1..20: mol_type = other RNA
cacagaaaggccttgtaagt

SEQ ID NO: 5585 - RNA, 20 nt, synthetic construct
  source 1..20: mol_type = other RNA
ctttctgtgtaaacaatacc

SEQ ID NO: 5586 - RNA, 20 nt, synthetic construct
  source 1..20: mol_type = other RNA
caggtattgtttacacagaa

SEQ ID NO: 5587 - RNA, 20 nt, synthetic construct
  source 1..20: mol_type = other RNA
tttaccccgttgcccggcaa

SEQ ID NO: 5588 - RNA, 20 nt, synthetic construct
  source 1..20: mol_type = other RNA
gggcaacggggtaaaggttc

SEQ ID NO: 5589 - RNA, 20 nt, synthetic construct
  source 1..20: mol_type = other RNA
gttgcccaaggtcttacata

SEQ ID NO: 5590 - RNA, 20 nt, synthetic construct
  source 1..20: mol_type = other RNA
tttgaagtatgcctcaaggt

SEQ ID NO: 5591 - RNA, 20 nt, synthetic construct
  source 1..20: mol_type = other RNA
gattaaaggtctttgtacta

SEQ ID NO: 5592 - RNA, 20 nt, synthetic construct
  source 1..20: mol_type = other RNA
ttaaaggtctttgtactagg

SEQ ID NO: 5593 - RNA, 20 nt, synthetic construct
  source 1..20: mol_type = other RNA
aggaggctgtaggcataaat

SEQ ID NO: 5594 - RNA, 20 nt, synthetic construct
  source 1..20: mol_type = other RNA
aaattgagagaagtccacca

SEQ ID NO: 5595 - RNA, 20 nt, synthetic construct
  source 1..20: mol_type = other RNA
agaagatgaggcatagcagc

SEQ ID NO: 5596 - RNA, 20 nt, synthetic construct
  source 1..20: mol_type = other RNA
caccacgagtctagactctg

SEQ ID NO: 5597 - RNA, 20 nt, synthetic construct
  source 1..20: mol_type = other RNA
gaagaactccctcgcctcgc

SEQ ID NO: 5598 - RNA, 20 nt, synthetic construct
  source 1..20: mol_type = other RNA
gaagatgaggcatagcagca

SEQ ID NO: 5599 - RNA, 20 nt, synthetic construct
  source 1..20: mol_type = other RNA
gagaagtccaccacgagtct

SEQ ID NO: 5600 - RNA, 20 nt, synthetic construct
  source 1..20: mol_type = other RNA
gaggtgaagcgaagtgcaca

SEQ ID NO: 5601 - RNA, 20 nt, synthetic construct
  source 1..20: mol_type = other RNA
tggacttctctcaattttct

SEQ ID NO: 5602 - RNA, 20 nt, synthetic construct
  source 1..20: mol_type = other RNA
agcgccgacgggacgtaaac

SEQ ID NO: 5603 - RNA, 20 nt, synthetic construct
  source 1..20: mol_type = other RNA
cgtcagcaaacacttggcac

SEQ ID NO: 5604 - RNA, 20 nt, synthetic construct
  source 1..20: mol_type = other RNA
gaggacaggaggttggtgag

SEQ ID NO: 5605 - RNA, 20 nt, synthetic construct
  source 1..20: mol_type = other RNA
agagaagtccaccacgagtc

SEQ ID NO: 5606 - RNA, 20 nt, synthetic construct
  source 1..20: mol_type = other RNA
tttataagggtcgatgtcca

SEQ ID NO: 5607 - RNA, 20 nt, synthetic construct
  source 1..20: mol_type = other RNA
aggtattgtttacacagaaa

SEQ ID NO: 5608 - RNA, 20 nt, synthetic construct
  source 1..20: mol_type = other RNA
tttacacagaaaggccttgt

SEQ ID NO: 5609 - DNA, 20 bp, synthetic construct
  source 1..20: mol_type = other DNA
aaaaaatcaaagaatgtttt

SEQ ID NO: 5610 - DNA, 20 bp, synthetic construct
  source 1..20: mol_type = other DNA
aaaaaatgtgaacagtttgt

SEQ ID NO: 5611 - DNA, 20 bp, synthetic construct
  source 1..20: mol_type = other DNA
aaaaaccccgcctgtaacac

SEQ ID NO: 5612 - DNA, 20 bp, synthetic construct
  source 1..20: mol_type = other DNA
aaaaagttgcatggtgctgg

SEQ ID NO: 5613 - DNA, 20 bp, synthetic construct
  source 1..20: mol_type = other DNA
aaaaatcaaagaatgtttta

SEQ ID NO: 5614 - DNA, 20 bp, synthetic construct
  source 1..20: mol_type = other DNA
aaaaatgtgaacagtttgta

SEQ ID NO: 5615 - DNA, 21 bp, synthetic construct
  source 1..21: mol_type = other DNA
aaaacaagcggctaggagttc

SEQ ID NO: 5616 - DNA, 21 bp, synthetic construct
  source 1..21: mol_type = other DNA
aaaacattctttgattttttg

SEQ ID NO: 5617 - DNA, 20 bp, synthetic construct
  source 1..20: mol_type = other DNA
aaaaccccgcctgtaacacg

SEQ ID NO: 5618 - DNA, 20 bp, synthetic construct
  source 1..20: mol_type = other DNA
aaaacgccgcagacacatcc

SEQ ID NO: 5619 - DNA, 20 bp, synthetic construct
  source 1..20: mol_type = other DNA
aaaagatggtgttttccaat

SEQ ID NO: 5620 - DNA, 20 bp, synthetic construct
  source 1..20: mol_type = other DNA
aaaaggttccacgcacgcgc

SEQ ID NO: 5621 - DNA, 20 bp, synthetic construct
  source 1..20: mol_type = other DNA
aaaagtgagacaagaaatgt

SEQ ID NO: 5622 - DNA, 20 bp, synthetic construct
  source 1..20: mol_type = other DNA
aaaatcaaagaatgttttag

SEQ ID NO: 5623 - DNA, 20 bp, synthetic construct
  source 1..20: mol_type = other DNA
aaaattggtaacagcggtaa

SEQ ID NO: 5624 - DNA, 20 bp, synthetic construct
  source 1..20: mol_type = other DNA
aaacaaaggacgtcccgcgc

SEQ ID NO: 5625 - DNA, 20 bp, synthetic construct
  source 1..20: mol_type = other DNA
aaacaagcggctaggagttc

SEQ ID NO: 5626 - DNA, 20 bp, synthetic construct
  source 1..20: mol_type = other DNA
aaacacagcaaatccagatt

SEQ ID NO: 5627 - DNA, 20 bp, synthetic construct
  source 1..20: mol_type = other DNA
aaacactcatcctcaggcca

SEQ ID NO: 5628 - DNA, 20 bp, synthetic construct
  source 1..20: mol_type = other DNA
aaacccagcccgaatgctcc

SEQ ID NO: 5629 - DNA, 20 bp, synthetic construct
  source 1..20: mol_type = other DNA
aaaccccgcctgtaacacga

SEQ ID NO: 5630 - DNA, 20 bp, synthetic construct
  source 1..20: mol_type = other DNA
aaacgagagtaactccacag

SEQ ID NO: 5631 - DNA, 20 bp, synthetic construct
  source 1..20: mol_type = other DNA
aaacgggcaacataccttga

SEQ ID NO: 5632 - DNA, 20 bp, synthetic construct
  source 1..20: mol_type = other DNA
aaactactgttgttagacga

SEQ ID NO: 5633 - DNA, 20 bp, synthetic construct
  source 1..20: mol_type = other DNA
aaactgagccaggagaaacg

SEQ ID NO: 5634 - DNA, 20 bp, synthetic construct
  source 1..20: mol_type = other DNA
aaactgttcacattttttga

SEQ ID NO: 5635 - DNA, 21 bp, synthetic construct
  source 1..21: mol_type = other DNA
aaacttcctattaacaggcct

SEQ ID NO: 5636 - DNA, 20 bp, synthetic construct
  source 1..20: mol_type = other DNA
aaagaatcccagaggattgc

SEQ ID NO: 5637 - DNA, 20 bp, synthetic construct
  source 1..20: mol_type = other DNA
aaagaatttggagctactgt

SEQ ID NO: 5638 - DNA, 20 bp, synthetic construct
  source 1..20: mol_type = other DNA
aaagactgggaggagttggg

SEQ ID NO: 5639 - DNA, 20 bp, synthetic construct
  source 1..20: mol_type = other DNA
aaagagatggggttactctc

SEQ ID NO: 5640 - DNA, 20 bp, synthetic construct
  source 1..20: mol_type = other DNA
aaagatggtgttttccaatg

SEQ ID NO: 5641 - DNA, 20 bp, synthetic construct
  source 1..20: mol_type = other DNA
aaagattctgccccatgctg

SEQ ID NO: 5642 - DNA, 20 bp, synthetic construct
  source 1..20: mol_type = other DNA
aaagccaaacagtgggggaa

SEQ ID NO: 5643 - DNA, 20 bp, synthetic construct
  source 1..20: mol_type = other DNA
aaagcccaggatgatgggat

SEQ ID NO: 5644 - DNA, 20 bp, synthetic construct
  source 1..20: mol_type = other DNA
aaaggccttgtaagttggcg

SEQ ID NO: 5645 - DNA, 21 bp, synthetic construct
  source 1..21: mol_type = other DNA
aaaggccttgtaagttggcga

SEQ ID NO: 5646 - DNA, 20 bp, synthetic construct
  source 1..20: mol_type = other DNA
aaaggtggagacagcggggt

SEQ ID NO: 5647 - DNA, 20 bp, synthetic construct
  source 1..20: mol_type = other DNA
aaagtatgtcaacgaattgt

SEQ ID NO: 5648 - DNA, 20 bp, synthetic construct
  source 1..20: mol_type = other DNA
aaagtgagacaagaaatgtg

SEQ ID NO: 5649 - DNA, 20 bp, synthetic construct
  source 1..20: mol_type = other DNA
aaagttgcatggtgctggtg

SEQ ID NO: 5650 - DNA, 20 bp, synthetic construct
  source 1..20: mol_type = other DNA
aaagtttgtagtatgccctg

SEQ ID NO: 5651 - DNA, 20 bp, synthetic construct
  source 1..20: mol_type = other DNA
aaatacaggcctctcactct

SEQ ID NO: 5652 - DNA, 20 bp, synthetic construct
  source 1..20: mol_type = other DNA
aaatatttaccattggataa

SEQ ID NO: 5653 - DNA, 20 bp, synthetic construct
  source 1..20: mol_type = other DNA
aaatcaaagaatgttttaga

SEQ ID NO: 5654 - DNA, 20 bp, synthetic construct
  source 1..20: mol_type = other DNA
aaatggggcagcaaaaccca

SEQ ID NO: 5655 - DNA, 20 bp, synthetic construct
  source 1..20: mol_type = other DNA
aaatgtatacccaaagacaa

SEQ ID NO: 5656 - DNA, 20 bp, synthetic construct
  source 1..20: mol_type = other DNA
aaatgtatattaggaaaaga

SEQ ID NO: 5657 - DNA, 20 bp, synthetic construct
  source 1..20: mol_type = other DNA
aaatgtgaaaccacaagagt

SEQ ID NO: 5658 - DNA, 20 bp, synthetic construct
  source 1..20: mol_type = other DNA
aaattaacacccacccaggt

SEQ ID NO: 5659 - DNA, 20 bp, synthetic construct
  source 1..20: mol_type = other DNA
aaattgagagaagtccacca

SEQ ID NO: 5660 - DNA, 20 bp, synthetic construct
  source 1..20: mol_type = other DNA
aaattggtaacagcggtaaa

SEQ ID NO: 5661 - DNA, 20 bp, synthetic construct
  source 1..20: mol_type = other DNA
aacaaacagtctttgaagta

SEQ ID NO: 5662 - DNA, 20 bp, synthetic construct
  source 1..20: mol_type = other DNA
aacaaaggacgtcccgcgca

SEQ ID NO: 5663 - DNA, 20 bp, synthetic construct
  source 1..20: mol_type = other DNA
aacaaatggcactagtaaac

SEQ ID NO: 5664 - DNA, 20 bp, synthetic construct
  source 1..20: mol_type = other DNA
aacaagaaaaaccccgcctg

SEQ ID NO: 5665 - DNA, 20 bp, synthetic construct
  source 1..20: mol_type = other DNA
aacaagaagatgaggcatag

SEQ ID NO: 5666 - DNA, 20 bp, synthetic construct
  source 1..20: mol_type = other DNA
aacaagagatgattaggcag

SEQ ID NO: 5667 - DNA, 21 bp, synthetic construct
  source 1..21: mol_type = other DNA
aacaagatctacagcatgggg

SEQ ID NO: 5668 - DNA, 20 bp, synthetic construct
  source 1..20: mol_type = other DNA
aacaaggacacctggccaga

SEQ ID NO: 5669 - DNA, 20 bp, synthetic construct
  source 1..20: mol_type = other DNA
aacaatgctcaggagactct

SEQ ID NO: 5670 - DNA, 20 bp, synthetic construct
  source 1..20: mol_type = other DNA
aacacagcaaatccagattg

SEQ ID NO: 5671 - DNA, 20 bp, synthetic construct
  source 1..20: mol_type = other DNA
aacacatcatacaaaaaatc

SEQ ID NO: 5672 - DNA, 21 bp, synthetic construct
  source 1..21: mol_type = other DNA
aacacatcatacaaaaaatca

SEQ ID NO: 5673 - DNA, 20 bp, synthetic construct
  source 1..20: mol_type = other DNA
aacacccacccaggtagcta

SEQ ID NO: 5674 - DNA, 20 bp, synthetic construct
  source 1..20: mol_type = other DNA
aacacgagaaggggtcctag

SEQ ID NO: 5675 - DNA, 20 bp, synthetic construct
  source 1..20: mol_type = other DNA
aacagagttatcagtcccga

SEQ ID NO: 5676 - DNA, 20 bp, synthetic construct
  source 1..20: mol_type = other DNA
aacagcggtaaaaagggact

SEQ ID NO: 5677 - DNA, 20 bp, synthetic construct
  source 1..20: mol_type = other DNA
aacagtaggacatgaacaag

SEQ ID NO: 5678 - DNA, 21 bp, synthetic construct
  source 1..21: mol_type = other DNA
aacagtaggacatgaacaaga

SEQ ID NO: 5679 - DNA, 21 bp, synthetic construct
  source 1..21: mol_type = other DNA
aacagtctttgaagtatgcct

SEQ ID NO: 5680 - DNA, 20 bp, synthetic construct
  source 1..20: mol_type = other DNA
aacagtgggggaaagcccta

SEQ ID NO: 5681 - DNA, 20 bp, synthetic construct
  source 1..20: mol_type = other DNA
aacataccttgatagtccag

SEQ ID NO: 5682 - DNA, 20 bp, synthetic construct
  source 1..20: mol_type = other DNA
aacatcacatcaggattcct

SEQ ID NO: 5683 - DNA, 20 bp, synthetic construct
  source 1..20: mol_type = other DNA
aacatggagaacatcacatc

SEQ ID NO: 5684 - DNA, 20 bp, synthetic construct
  source 1..20: mol_type = other DNA
aacattgaggttcccgagat

SEQ ID NO: 5685 - DNA, 20 bp, synthetic construct
  source 1..20: mol_type = other DNA
aaccactgaacaaatggcac

SEQ ID NO: 5686 - DNA, 20 bp, synthetic construct
  source 1..20: mol_type = other DNA
aaccaggacaagttggagga

SEQ ID NO: 5687 - DNA, 20 bp, synthetic construct
  source 1..20: mol_type = other DNA
aacccataaaattcagagag

SEQ ID NO: 5688 - DNA, 21 bp, synthetic construct
  source 1..21: mol_type = other DNA
aaccccatctctttgttttgt

SEQ ID NO: 5689 - DNA, 20 bp, synthetic construct
  source 1..20: mol_type = other DNA
aacccccactggctggggct

SEQ ID NO: 5690 - DNA, 20 bp, synthetic construct
  source 1..20: mol_type = other DNA
aaccccgcctgtaacacgag

SEQ ID NO: 5691 - DNA, 21 bp, synthetic construct
  source 1..21: mol_type = other DNA
aaccccgcctgtaacacgaga

SEQ ID NO: 5692 - DNA, 21 bp, synthetic construct
  source 1..21: mol_type = other DNA
aaccctaacaaaacaaagaga

SEQ ID NO: 5693 - DNA, 21 bp, synthetic construct
  source 1..21: mol_type = other DNA
aacctagcaggcataatcaat

SEQ ID NO: 5694 - DNA, 20 bp, synthetic construct
  source 1..20: mol_type = other DNA
aacctgcatgactactgctc

SEQ ID NO: 5695 - DNA, 20 bp, synthetic construct
  source 1..20: mol_type = other DNA
aacctttcaccaaactctgc

SEQ ID NO: 5696 - DNA, 20 bp, synthetic construct
  source 1..20: mol_type = other DNA
aacctttggataaaacctag

SEQ ID NO: 5697 - DNA, 20 bp, synthetic construct
  source 1..20: mol_type = other DNA
aaccttttcggctcctctgc

SEQ ID NO: 5698 - DNA, 20 bp, synthetic construct
  source 1..20: mol_type = other DNA
aacgagagtaactccacagt

SEQ ID NO: 5699 - DNA, 21 bp, synthetic construct
  source 1..21: mol_type = other DNA
aacgcaggataaccacattgt

SEQ ID NO: 5700 - DNA, 20 bp, synthetic construct
  source 1..20: mol_type = other DNA
aacgcccaccgaatgttgcc

SEQ ID NO: 5701 - DNA, 20 bp, synthetic construct
  source 1..20: mol_type = other DNA
aacgccgcagacacatccag

SEQ ID NO: 5702 - DNA, 20 bp, synthetic construct
  source 1..20: mol_type = other DNA
aacggtttctcttccaaaag

SEQ ID NO: 5703 - DNA, 20 bp, synthetic construct
  source 1..20: mol_type = other DNA
aactaatgactctagctacc

SEQ ID NO: 5704 - DNA, 20 bp, synthetic construct
  source 1..20: mol_type = other DNA
aactaccgtgtgtcttggcc

SEQ ID NO: 5705 - DNA, 20 bp, synthetic construct
  source 1..20: mol_type = other DNA
aactactgttgttagacgac

SEQ ID NO: 5706 - DNA, 20 bp, synthetic construct
  source 1..20: mol_type = other DNA
aactagatgttctggataat

SEQ ID NO: 5707 - DNA, 20 bp, synthetic construct
  source 1..20: mol_type = other DNA
aactccctcgcctcgcagac

SEQ ID NO: 5708 - DNA, 20 bp, synthetic construct
  source 1..20: mol_type = other DNA
aactcctcccagtctttaaa

SEQ ID NO: 5709 - DNA, 20 bp, synthetic construct
  source 1..20: mol_type = other DNA
aactctgcaagatcccagag

SEQ ID NO: 5710 - DNA, 20 bp, synthetic construct
  source 1..20: mol_type = other DNA
aactctgttgtcctctcccg

SEQ ID NO: 5711 - DNA, 20 bp, synthetic construct
  source 1..20: mol_type = other DNA
aactgaaagccaaacagtgg

SEQ ID NO: 5712 - DNA, 20 bp, synthetic construct
  source 1..20: mol_type = other DNA
aactggagccaccagcaggg

SEQ ID NO: 5713 - DNA, 21 bp, synthetic construct
  source 1..21: mol_type = other DNA
aacttccaatgacataaccca

SEQ ID NO: 5714 - DNA, 20 bp, synthetic construct
  source 1..20: mol_type = other DNA
aacttgtcctggttatcgct

SEQ ID NO: 5715 - DNA, 20 bp, synthetic construct
  source 1..20: mol_type = other DNA
aagaaaattggtaacagcgg

SEQ ID NO: 5716 - DNA, 20 bp, synthetic construct
  source 1..20: mol_type = other DNA
aagaaccaacaagaagatga

SEQ ID NO: 5717 - DNA, 20 bp, synthetic construct
  source 1..20: mol_type = other DNA
aagaagatgaggcatagcag

SEQ ID NO: 5718 - DNA, 20 bp, synthetic construct
  source 1..20: mol_type = other DNA
aagaagattgcaattgatta

SEQ ID NO: 5719 - DNA, 20 bp, synthetic construct
  source 1..20: mol_type = other DNA
aagaagtcagaaggcaaaaa

SEQ ID NO: 5720 - DNA, 21 bp, synthetic construct
  source 1..21: mol_type = other DNA
aagaagtcagaaggcaaaaac

SEQ ID NO: 5721 - DNA, 20 bp, synthetic construct
  source 1..20: mol_type = other DNA
aagaatcctcacaataccgc

SEQ ID NO: 5722 - DNA, 20 bp, synthetic construct
  source 1..20: mol_type = other DNA
aagaattgcttgcctgagtg

SEQ ID NO: 5723 - DNA, 20 bp, synthetic construct
  source 1..20: mol_type = other DNA
aagaatttggagctactgtg

SEQ ID NO: 5724 - DNA, 20 bp, synthetic construct
  source 1..20: mol_type = other DNA
aagacattatcaaaaaatgt

SEQ ID NO: 5725 - DNA, 21 bp, synthetic construct
  source 1..21: mol_type = other DNA
aagacattatcaaaaaatgtg

SEQ ID NO: 5726 - DNA, 20 bp, synthetic construct
  source 1..20: mol_type = other DNA
aagactgggaggagttgggg

SEQ ID NO: 5727 - DNA, 20 bp, synthetic construct
  source 1..20: mol_type = other DNA
aagactgtttgtttaaagac

SEQ ID NO: 5728 - DNA, 21 bp, synthetic construct
  source 1..21: mol_type = other DNA
aagagaaaccgttatagagta

SEQ ID NO: 5729 - DNA, 20 bp, synthetic construct
  source 1..20: mol_type = other DNA
aagagagaaacaacacatag

SEQ ID NO: 5730 - DNA, 20 bp, synthetic construct
  source 1..20: mol_type = other DNA
aagagatgattaggcagagg

SEQ ID NO: 5731 - DNA, 20 bp, synthetic construct
  source 1..20: mol_type = other DNA
aagagatggggttactctct

SEQ ID NO: 5732 - DNA, 20 bp, synthetic construct
  source 1..20: mol_type = other DNA
aagaggactcttggactctc

SEQ ID NO: 5733 - DNA, 20 bp, synthetic construct
  source 1..20: mol_type = other DNA
aagatctacagcatggggca

SEQ ID NO: 5734 - DNA, 20 bp, synthetic construct
  source 1..20: mol_type = other DNA
aagatctcgtactgaaggaa

SEQ ID NO: 5735 - DNA, 20 bp, synthetic construct
  source 1..20: mol_type = other DNA
aagatggtgttttccaatga

SEQ ID NO: 5736 - DNA, 20 bp, synthetic construct
  source 1..20: mol_type = other DNA
aagattctgccccatgctgt

SEQ ID NO: 5737 - DNA, 20 bp, synthetic construct
  source 1..20: mol_type = other DNA
aagattgacgataagggaga

SEQ ID NO: 5738 - DNA, 20 bp, synthetic construct
  source 1..20: mol_type = other DNA
aagcaattctttgctggggg

SEQ ID NO: 5739 - DNA, 20 bp, synthetic construct
  source 1..20: mol_type = other DNA
aagccacccaaggcacagct

SEQ ID NO: 5740 - DNA, 20 bp, synthetic construct
  source 1..20: mol_type = other DNA
aagcccaggatgatgggatg

SEQ ID NO: 5741 - DNA, 20 bp, synthetic construct
  source 1..20: mol_type = other DNA
aagccccagccagtgggggt

SEQ ID NO: 5742 - DNA, 20 bp, synthetic construct
  source 1..20: mol_type = other DNA
aagccctacgaaccactgaa

SEQ ID NO: 5743 - DNA, 20 bp, synthetic construct
  source 1..20: mol_type = other DNA
aagcctccaagctgtgcctt

SEQ ID NO: 5744 - DNA, 20 bp, synthetic construct
  source 1..20: mol_type = other DNA
aagcgaagtgcacacggtcc

SEQ ID NO: 5745 - DNA, 21 bp, synthetic construct
  source 1..21: mol_type = other DNA
aagcgaagtgcacacggtccg

SEQ ID NO: 5746 - DNA, 20 bp, synthetic construct
  source 1..20: mol_type = other DNA
aaggaaagaagtcagaaggc

SEQ ID NO: 5747 - DNA, 20 bp, synthetic construct
  source 1..20: mol_type = other DNA
aaggacacctggccagacgc

SEQ ID NO: 5748 - DNA, 20 bp, synthetic construct
  source 1..20: mol_type = other DNA
aaggcacagcttggaggctt

SEQ ID NO: 5749 - DNA, 21 bp, synthetic construct
  source 1..21: mol_type = other DNA
aaggcacagcttggaggcttg

SEQ ID NO: 5750 - DNA, 20 bp, synthetic construct
  source 1..20: mol_type = other DNA
aaggcctccgtgcggtgggg

SEQ ID NO: 5751 - DNA, 20 bp, synthetic construct
  source 1..20: mol_type = other DNA
aaggccttgtaagttggcga

SEQ ID NO: 5752 - DNA, 20 bp, synthetic construct
  source 1..20: mol_type = other DNA
aaggcgggtatattatataa

SEQ ID NO: 5753 - DNA, 20 bp, synthetic construct
  source 1..20: mol_type = other DNA
aaggcttcccgatacagagc

SEQ ID NO: 5754 - DNA, 20 bp, synthetic construct
  source 1..20: mol_type = other DNA
aagggactcaagatgctgta

SEQ ID NO: 5755 - DNA, 20 bp, synthetic construct
  source 1..20: mol_type = other DNA
aaggggacgagagagtccca

SEQ ID NO: 5756 - DNA, 21 bp, synthetic construct
  source 1..21: mol_type = other DNA
aaggggtcctaggaatcctga

SEQ ID NO: 5757 - DNA, 20 bp, synthetic construct
  source 1..20: mol_type = other DNA
aagggtcgatgtccatgccc

SEQ ID NO: 5758 - DNA, 20 bp, synthetic construct
  source 1..20: mol_type = other DNA
aagggtcgtccgcaggattc

SEQ ID NO: 5759 - DNA, 20 bp, synthetic construct
  source 1..20: mol_type = other DNA
aaggtaggagctggagcatt

SEQ ID NO: 5760 - DNA, 20 bp, synthetic construct
  source 1..20: mol_type = other DNA
aaggtcggtcgttgacattg

SEQ ID NO: 5761 - DNA, 20 bp, synthetic construct
  source 1..20: mol_type = other DNA
aaggtggagacagcggggta

SEQ ID NO: 5762 - DNA, 21 bp, synthetic construct
  source 1..21: mol_type = other DNA
aaggttaccaaatatttacca

SEQ ID NO: 5763 - DNA, 20 bp, synthetic construct
  source 1..20: mol_type = other DNA
aaggtttggtacagcaacag

SEQ ID NO: 5764 - DNA, 21 bp, synthetic construct
  source 1..21: mol_type = other DNA
aaggtttggtacagcaacagg

SEQ ID NO: 5765 - DNA, 20 bp, synthetic construct
  source 1..20: mol_type = other DNA
aagtcagaaggcaaaaacga

SEQ ID NO: 5766 - DNA, 20 bp, synthetic construct
  source 1..20: mol_type = other DNA
aagtgaaagcctgcttagat

SEQ ID NO: 5767 - DNA, 20 bp, synthetic construct
  source 1..20: mol_type = other DNA
aagttatgggtccttgccac

SEQ ID NO: 5768 - DNA, 21 bp, synthetic construct
  source 1..21: mol_type = other DNA
aagttggaggacaggaggttg

SEQ ID NO: 5769 - DNA, 20 bp, synthetic construct
  source 1..20: mol_type = other DNA
aagttttctaaaacattctt

SEQ ID NO: 5770 - DNA, 20 bp, synthetic construct
  source 1..20: mol_type = other DNA
aatacaggcctctcactctg

SEQ ID NO: 5771 - DNA, 20 bp, synthetic construct
  source 1..20: mol_type = other DNA
aatactaacattgaggttcc

SEQ ID NO: 5772 - DNA, 20 bp, synthetic construct
  source 1..20: mol_type = other DNA
aatagtgtctagtttggaag

SEQ ID NO: 5773 - DNA, 21 bp, synthetic construct
  source 1..21: mol_type = other DNA
aatagtgtctagtttggaagt

SEQ ID NO: 5774 - DNA, 20 bp, synthetic construct
  source 1..20: mol_type = other DNA
aatatggtgacccacaaaat

SEQ ID NO: 5775 - DNA, 20 bp, synthetic construct
  source 1..20: mol_type = other DNA
aatatttggtaacctttgga

SEQ ID NO: 5776 - DNA, 20 bp, synthetic construct
  source 1..20: mol_type = other DNA
aatcaataggcctgttaata

SEQ ID NO: 5777 - DNA, 20 bp, synthetic construct
  source 1..20: mol_type = other DNA
aatcccagaggattgctggt

SEQ ID NO: 5778 - DNA, 20 bp, synthetic construct
  source 1..20: mol_type = other DNA
aatccgcctcctgcctccac

SEQ ID NO: 5779 - DNA, 20 bp, synthetic construct
  source 1..20: mol_type = other DNA
aatcctctgggattctttcc

SEQ ID NO: 5780 - DNA, 21 bp, synthetic construct
  source 1..21: mol_type = other DNA
aatcctgcggacgacccttct

SEQ ID NO: 5781 - DNA, 21 bp, synthetic construct
  source 1..21: mol_type = other DNA
aatcgccgcgtcgcagaagat

SEQ ID NO: 5782 - DNA, 20 bp, synthetic construct
  source 1..20: mol_type = other DNA
aatctcgggaacctcaatgt

SEQ ID NO: 5783 - DNA, 21 bp, synthetic construct
  source 1..21: mol_type = other DNA
aatcttcttttctcattaact

SEQ ID NO: 5784 - DNA, 20 bp, synthetic construct
  source 1..20: mol_type = other DNA
aatgactctagctacctggg

SEQ ID NO: 5785 - DNA, 20 bp, synthetic construct
  source 1..20: mol_type = other DNA
aatgattaactagatgttct

SEQ ID NO: 5786 - DNA, 21 bp, synthetic construct
  source 1..21: mol_type = other DNA
aatgattaactagatgttctg

SEQ ID NO: 5787 - DNA, 20 bp, synthetic construct
  source 1..20: mol_type = other DNA
aatggcactagtaaactgag

SEQ ID NO: 5788 - DNA, 20 bp, synthetic construct
  source 1..20: mol_type = other DNA
aatggggcagcaaaacccaa

SEQ ID NO: 5789 - DNA, 20 bp, synthetic construct
  source 1..20: mol_type = other DNA
aatgtatacccaaagacaaa

SEQ ID NO: 5790 - DNA, 21 bp, synthetic construct
  source 1..21: mol_type = other DNA
aatgtatacccaaagacaaaa

SEQ ID NO: 5791 - DNA, 20 bp, synthetic construct
  source 1..20: mol_type = other DNA
aatgtcaacgaccgaccttg

SEQ ID NO: 5792 - DNA, 20 bp, synthetic construct
  source 1..20: mol_type = other DNA
aatgtttgctccagacctgc

SEQ ID NO: 5793 - DNA, 20 bp, synthetic construct
  source 1..20: mol_type = other DNA
aattcgcagtccccaacctc

SEQ ID NO: 5794 - DNA, 21 bp, synthetic construct
  source 1..21: mol_type = other DNA
aattcgttgacatactttcca

SEQ ID NO: 5795 - DNA, 20 bp, synthetic construct
  source 1..20: mol_type = other DNA
aattctttgctggggggaac

SEQ ID NO: 5796 - DNA, 20 bp, synthetic construct
  source 1..20: mol_type = other DNA
aattgagagaagtccaccac

SEQ ID NO: 5797 - DNA, 20 bp, synthetic construct
  source 1..20: mol_type = other DNA
aattggtaacagcggtaaaa

SEQ ID NO: 5798 - DNA, 20 bp, synthetic construct
  source 1..20: mol_type = other DNA
aatttatgcctacagcctcc

SEQ ID NO: 5799 - DNA, 20 bp, synthetic construct
  source 1..20: mol_type = other DNA
aatttggaagatccagcatc

SEQ ID NO: 5800 - DNA, 20 bp, synthetic construct
  source 1..20: mol_type = other DNA
aattttatgggttatgtcat

SEQ ID NO: 5801 - DNA, 21 bp, synthetic construct
  source 1..21: mol_type = other DNA
aattttatgggttatgtcatt

SEQ ID NO: 5802 - DNA, 20 bp, synthetic construct
  source 1..20: mol_type = other DNA
aattttccgaaagcccagga

SEQ ID NO: 5803 - DNA, 20 bp, synthetic construct
  source 1..20: mol_type = other DNA
acaaactttgccagcaaatc

SEQ ID NO: 5804 - DNA, 21 bp, synthetic construct
  source 1..21: mol_type = other DNA
acaaagagatggggttactct

SEQ ID NO: 5805 - DNA, 20 bp, synthetic construct
  source 1..20: mol_type = other DNA
acaaatggcactagtaaact

SEQ ID NO: 5806 - DNA, 21 bp, synthetic construct
  source 1..21: mol_type = other DNA
acaacagtagtttccggaagt

SEQ ID NO: 5807 - DNA, 21 bp, synthetic construct
  source 1..21: mol_type = other DNA
acaacctttcaccaaactctg

SEQ ID NO: 5808 - DNA, 20 bp, synthetic construct
  source 1..20: mol_type = other DNA
acaagaaatgtgaaaccaca

SEQ ID NO: 5809 - DNA, 20 bp, synthetic construct
  source 1..20: mol_type = other DNA
acaagaacacatcatacaaa

SEQ ID NO: 5810 - DNA, 20 bp, synthetic construct
  source 1..20: mol_type = other DNA
acaagaagatgaggcatagc

SEQ ID NO: 5811 - DNA, 21 bp, synthetic construct
  source 1..21: mol_type = other DNA
acaagaatcctcacaataccg

SEQ ID NO: 5812 - DNA, 20 bp, synthetic construct
  source 1..20: mol_type = other DNA
acaagagttgcctgaacttt

SEQ ID NO: 5813 - DNA, 20 bp, synthetic construct
  source 1..20: mol_type = other DNA
acaagatctacagcatgggg

SEQ ID NO: 5814 - DNA, 20 bp, synthetic construct
  source 1..20: mol_type = other DNA
acaagcggctaggagttccg

SEQ ID NO: 5815 - DNA, 20 bp, synthetic construct
  source 1..20: mol_type = other DNA
acaaggcctttctgtgtaaa

SEQ ID NO: 5816 - DNA, 20 bp, synthetic construct
  source 1..20: mol_type = other DNA
acaagggcattaacgcagga

SEQ ID NO: 5817 - DNA, 20 bp, synthetic construct
  source 1..20: mol_type = other DNA
acaatgctcaggagactcta

SEQ ID NO: 5818 - DNA, 20 bp, synthetic construct
  source 1..20: mol_type = other DNA
acaatgtggttatcctgcgt

SEQ ID NO: 5819 - DNA, 20 bp, synthetic construct
  source 1..20: mol_type = other DNA
acacacggtagttcccccta

SEQ ID NO: 5820 - DNA, 20 bp, synthetic construct
  source 1..20: mol_type = other DNA
acacatagcgcctcattttg

SEQ ID NO: 5821 - DNA, 20 bp, synthetic construct
  source 1..20: mol_type = other DNA
acacatcatacaaaaaatca

SEQ ID NO: 5822 - DNA, 21 bp, synthetic construct
  source 1..21: mol_type = other DNA
acacatccagcgataaccagg

SEQ ID NO: 5823 - DNA, 20 bp, synthetic construct
  source 1..20: mol_type = other DNA
acacctggccagacgccaac

SEQ ID NO: 5824 - DNA, 20 bp, synthetic construct
  source 1..20: mol_type = other DNA
acacggtagttccccctaga

SEQ ID NO: 5825 - DNA, 20 bp, synthetic construct
  source 1..20: mol_type = other DNA
acacggtccggcagatgaga

SEQ ID NO: 5826 - DNA, 20 bp, synthetic construct
  source 1..20: mol_type = other DNA
acactatttacacactctat

SEQ ID NO: 5827 - DNA, 20 bp, synthetic construct
  source 1..20: mol_type = other DNA
acactcatcctcaggccatg

SEQ ID NO: 5828 - DNA, 20 bp, synthetic construct
  source 1..20: mol_type = other DNA
acagaaaggccttgtaagtt

SEQ ID NO: 5829 - DNA, 20 bp, synthetic construct
  source 1..20: mol_type = other DNA
acagacggggagtccgcgta

SEQ ID NO: 5830 - DNA, 20 bp, synthetic construct
  source 1..20: mol_type = other DNA
acagagctgaggcggtatct

SEQ ID NO: 5831 - DNA, 21 bp, synthetic construct
  source 1..21: mol_type = other DNA
acagagctgaggcggtatcta

SEQ ID NO: 5832 - DNA, 21 bp, synthetic construct
  source 1..21: mol_type = other DNA
acagcaaatccagattgggac

SEQ ID NO: 5833 - DNA, 20 bp, synthetic construct
  source 1..20: mol_type = other DNA
acagcaacaggagggataca

SEQ ID NO: 5834 - DNA, 21 bp, synthetic construct
  source 1..21: mol_type = other DNA
acagcaacaggagggatacat

SEQ ID NO: 5835 - DNA, 20 bp, synthetic construct
  source 1..20: mol_type = other DNA
acagcggtaaaaagggactc

SEQ ID NO: 5836 - DNA, 20 bp, synthetic construct
  source 1..20: mol_type = other DNA
acagcttggaggcttgaaca

SEQ ID NO: 5837 - DNA, 20 bp, synthetic construct
  source 1..20: mol_type = other DNA
acaggaggttggtgagtgat

SEQ ID NO: 5838 - DNA, 21 bp, synthetic construct
  source 1..21: mol_type = other DNA
acaggaggttggtgagtgatt

SEQ ID NO: 5839 - DNA, 20 bp, synthetic construct
  source 1..20: mol_type = other DNA
acaggcggggtttttcttgt

SEQ ID NO: 5840 - DNA, 20 bp, synthetic construct
  source 1..20: mol_type = other DNA
acaggtacagtagaagaata

SEQ ID NO: 5841 - DNA, 20 bp, synthetic construct
  source 1..20: mol_type = other DNA
acaggtgcaatttccgtccg

SEQ ID NO: 5842 - DNA, 20 bp, synthetic construct
  source 1..20: mol_type = other DNA
acagtagtttccggaagtgt

SEQ ID NO: 5843 - DNA, 20 bp, synthetic construct
  source 1..20: mol_type = other DNA
acagtctttgaagtatgcct

SEQ ID NO: 5844 - DNA, 20 bp, synthetic construct
  source 1..20: mol_type = other DNA
acagtgggggaaagccctac

SEQ ID NO: 5845 - DNA, 20 bp, synthetic construct
  source 1..20: mol_type = other DNA
acagtttgtaggcccactta

SEQ ID NO: 5846 - DNA, 20 bp, synthetic construct
  source 1..20: mol_type = other DNA
acataacccataaaattcag

SEQ ID NO: 5847 - DNA, 21 bp, synthetic construct
  source 1..21: mol_type = other DNA
acataactgactactaggtct

SEQ ID NO: 5848 - DNA, 20 bp, synthetic construct
  source 1..20: mol_type = other DNA
acataccttgatagtccaga

SEQ ID NO: 5849 - DNA, 20 bp, synthetic construct
  source 1..20: mol_type = other DNA
acatcacatcaggattccta

SEQ ID NO: 5850 - DNA, 20 bp, synthetic construct
  source 1..20: mol_type = other DNA
acatcatacaaaaaatcaaa

SEQ ID NO: 5851 - DNA, 20 bp, synthetic construct
  source 1..20: mol_type = other DNA
acatcatccatataactgaa

SEQ ID NO: 5852 - DNA, 20 bp, synthetic construct
  source 1..20: mol_type = other DNA
acatccagcgataaccagga

SEQ ID NO: 5853 - DNA, 20 bp, synthetic construct
  source 1..20: mol_type = other DNA
acatcgtatccatggctgct

SEQ ID NO: 5854 - DNA, 20 bp, synthetic construct
  source 1..20: mol_type = other DNA
acatgaacaagagatgatta

SEQ ID NO: 5855 - DNA, 20 bp, synthetic construct
  source 1..20: mol_type = other DNA
acatggagaacatcacatca

SEQ ID NO: 5856 - DNA, 20 bp, synthetic construct
  source 1..20: mol_type = other DNA
acattatcaaaaaatgtgaa

SEQ ID NO: 5857 - DNA, 20 bp, synthetic construct
  source 1..20: mol_type = other DNA
acattctttgattttttgta

SEQ ID NO: 5858 - DNA, 20 bp, synthetic construct
  source 1..20: mol_type = other DNA
acattgaggttcccgagatt

SEQ ID NO: 5859 - DNA, 20 bp, synthetic construct
  source 1..20: mol_type = other DNA
acattgtgtaaatggggcag

SEQ ID NO: 5860 - DNA, 20 bp, synthetic construct
  source 1..20: mol_type = other DNA
acatttaaaccctaacaaaa

SEQ ID NO: 5861 - DNA, 20 bp, synthetic construct
  source 1..20: mol_type = other DNA
acatttcttgtctcactttt

SEQ ID NO: 5862 - DNA, 20 bp, synthetic construct
  source 1..20: mol_type = other DNA
accaaactctgcaagatccc

SEQ ID NO: 5863 - DNA, 20 bp, synthetic construct
  source 1..20: mol_type = other DNA
accaaatatttaccattgga

SEQ ID NO: 5864 - DNA, 21 bp, synthetic construct
  source 1..21: mol_type = other DNA
accaaatatttaccattggat

SEQ ID NO: 5865 - DNA, 20 bp, synthetic construct
  source 1..20: mol_type = other DNA
accaaatgcccctatcctat

SEQ ID NO: 5866 - DNA, 20 bp, synthetic construct
  source 1..20: mol_type = other DNA
accaacaagaagatgaggca

SEQ ID NO: 5867 - DNA, 21 bp, synthetic construct
  source 1..21: mol_type = other DNA
accaatttatgcctacagcct

SEQ ID NO: 5868 - DNA, 20 bp, synthetic construct
  source 1..20: mol_type = other DNA
accaattttcttttgtcttt

SEQ ID NO: 5869 - DNA, 20 bp, synthetic construct
  source 1..20: mol_type = other DNA
accacatcatccatataact

SEQ ID NO: 5870 - DNA, 20 bp, synthetic construct
  source 1..20: mol_type = other DNA
accacattgtgtaaatgggg

SEQ ID NO: 5871 - DNA, 20 bp, synthetic construct
  source 1..20: mol_type = other DNA
accaggacaagttggaggac

SEQ ID NO: 5872 - DNA, 21 bp, synthetic construct
  source 1..21: mol_type = other DNA
accaggacaagttggaggaca

SEQ ID NO: 5873 - DNA, 21 bp, synthetic construct
  source 1..21: mol_type = other DNA
accagtaaagttccccacctt

SEQ ID NO: 5874 - DNA, 20 bp, synthetic construct
  source 1..20: mol_type = other DNA
accagttggatccagccttc

SEQ ID NO: 5875 - DNA, 20 bp, synthetic construct
  source 1..20: mol_type = other DNA
acccaaagacaaaagaaaat

SEQ ID NO: 5876 - DNA, 20 bp, synthetic construct
  source 1..20: mol_type = other DNA
acccaggtagctagagtcat

SEQ ID NO: 5877 - DNA, 20 bp, synthetic construct
  source 1..20: mol_type = other DNA
acccataacttccaatgaca

SEQ ID NO: 5878 - DNA, 20 bp, synthetic construct
  source 1..20: mol_type = other DNA
accccatctctttgttttgt

SEQ ID NO: 5879 - DNA, 20 bp, synthetic construct
  source 1..20: mol_type = other DNA
accccgagaagggtcgtccg

SEQ ID NO: 5880 - DNA, 20 bp, synthetic construct
  source 1..20: mol_type = other DNA
accccgcctgtaacacgaga

SEQ ID NO: 5881 - DNA, 20 bp, synthetic construct
  source 1..20: mol_type = other DNA
accccgctgtctccaccttt

SEQ ID NO: 5882 - DNA, 20 bp, synthetic construct
  source 1..20: mol_type = other DNA
accccttctcgtgttacagg

SEQ ID NO: 5883 - DNA, 20 bp, synthetic construct
  source 1..20: mol_type = other DNA
accctaacaaaacaaagaga

SEQ ID NO: 5884 - DNA, 21 bp, synthetic construct
  source 1..21: mol_type = other DNA
acccttatccaatggtaaata

SEQ ID NO: 5885 - DNA, 20 bp, synthetic construct
  source 1..20: mol_type = other DNA
acccttctcggggtcgcttg

SEQ ID NO: 5886 - DNA, 20 bp, synthetic construct
  source 1..20: mol_type = other DNA
accgaccttgaggcatactt

SEQ ID NO: 5887 - DNA, 20 bp, synthetic construct
  source 1..20: mol_type = other DNA
accgcctcagctctgtatcg

SEQ ID NO: 5888 - DNA, 20 bp, synthetic construct
  source 1..20: mol_type = other DNA
acctagcaggcataatcaat

SEQ ID NO: 5889 - DNA, 20 bp, synthetic construct
  source 1..20: mol_type = other DNA
acctcaatgttagtattcct

SEQ ID NO: 5890 - DNA, 20 bp, synthetic construct
  source 1..20: mol_type = other DNA
acctcaccatactgcactca

SEQ ID NO: 5891 - DNA, 21 bp, synthetic construct
  source 1..21: mol_type = other DNA
acctcctgtcctccaacttgt

SEQ ID NO: 5892 - DNA, 20 bp, synthetic construct
  source 1..20: mol_type = other DNA
acctgcatgactactgctca

SEQ ID NO: 5893 - DNA, 20 bp, synthetic construct
  source 1..20: mol_type = other DNA
acctggccgttgccgggcaa

SEQ ID NO: 5894 - DNA, 20 bp, synthetic construct
  source 1..20: mol_type = other DNA
acctgggtgggtgttaattt

SEQ ID NO: 5895 - DNA, 21 bp, synthetic construct
  source 1..21: mol_type = other DNA
acctgggtgggtgttaatttg

SEQ ID NO: 5896 - DNA, 20 bp, synthetic construct
  source 1..20: mol_type = other DNA
acctgtctttaatcctcatt

SEQ ID NO: 5897 - DNA, 20 bp, synthetic construct
  source 1..20: mol_type = other DNA
accttattatccagaacatc

SEQ ID NO: 5898 - DNA, 20 bp, synthetic construct
  source 1..20: mol_type = other DNA
accttcgtctgcgaggcgag

SEQ ID NO: 5899 - DNA, 20 bp, synthetic construct
  source 1..20: mol_type = other DNA
accttgggcaacattcggtg

SEQ ID NO: 5900 - DNA, 20 bp, synthetic construct
  source 1..20: mol_type = other DNA
acctttaccccgttgcccgg

SEQ ID NO: 5901 - DNA, 20 bp, synthetic construct
  source 1..20: mol_type = other DNA
acctttcaccaaactctgca

SEQ ID NO: 5902 - DNA, 20 bp, synthetic construct
  source 1..20: mol_type = other DNA
acctttggataaaacctagc

SEQ ID NO: 5903 - DNA, 21 bp, synthetic construct
  source 1..21: mol_type = other DNA
acgaaccactgaacaaatggc

SEQ ID NO: 5904 - DNA, 20 bp, synthetic construct
  source 1..20: mol_type = other DNA
acgacgaggcaggtccccta

SEQ ID NO: 5905 - DNA, 21 bp, synthetic construct
  source 1..21: mol_type = other DNA
acgagaaggggtcctaggaat

SEQ ID NO: 5906 - DNA, 20 bp, synthetic construct
  source 1..20: mol_type = other DNA
acgaggcaggtcccctagaa

SEQ ID NO: 5907 - DNA, 20 bp, synthetic construct
  source 1..20: mol_type = other DNA
acgatgtatatttgcgggag

SEQ ID NO: 5908 - DNA, 20 bp, synthetic construct
  source 1..20: mol_type = other DNA
acgcaacccccactggctgg

SEQ ID NO: 5909 - DNA, 20 bp, synthetic construct
  source 1..20: mol_type = other DNA
acgcacgcgctgatggccca

SEQ ID NO: 5910 - DNA, 20 bp, synthetic construct
  source 1..20: mol_type = other DNA
acgccaacaaggtaggagct

SEQ ID NO: 5911 - DNA, 20 bp, synthetic construct
  source 1..20: mol_type = other DNA
acgcccaccgaatgttgccc

SEQ ID NO: 5912 - DNA, 20 bp, synthetic construct
  source 1..20: mol_type = other DNA
acgcgctgatggcccatgac

SEQ ID NO: 5913 - DNA, 20 bp, synthetic construct
  source 1..20: mol_type = other DNA
acggaggccttttggggtgg

SEQ ID NO: 5914 - DNA, 20 bp, synthetic construct
  source 1..20: mol_type = other DNA
acggcagacggagaagggga

SEQ ID NO: 5915 - DNA, 20 bp, synthetic construct
  source 1..20: mol_type = other DNA
acgggctgaggcccactccc

SEQ ID NO: 5916 - DNA, 20 bp, synthetic construct
  source 1..20: mol_type = other DNA
acggggagtccgcgtaaaga

SEQ ID NO: 5917 - DNA, 20 bp, synthetic construct
  source 1..20: mol_type = other DNA
acggggcgcacctctcttta

SEQ ID NO: 5918 - DNA, 20 bp, synthetic construct
  source 1..20: mol_type = other DNA
acggtggtctccatgcgacg

SEQ ID NO: 5919 - DNA, 20 bp, synthetic construct
  source 1..20: mol_type = other DNA
acggtttctcttccaaaagt

SEQ ID NO: 5920 - DNA, 20 bp, synthetic construct
  source 1..20: mol_type = other DNA
acgtcgcatggagaccaccg

SEQ ID NO: 5921 - DNA, 20 bp, synthetic construct
  source 1..20: mol_type = other DNA
actaatatgggcctaaagtt

SEQ ID NO: 5922 - DNA, 20 bp, synthetic construct
  source 1..20: mol_type = other DNA
actaatgactctagctacct

SEQ ID NO: 5923 - DNA, 20 bp, synthetic construct
  source 1..20: mol_type = other DNA
actaccgtgtgtcttggcca

SEQ ID NO: 5924 - DNA, 20 bp, synthetic construct
  source 1..20: mol_type = other DNA
actactaggtctctagatgc

SEQ ID NO: 5925 - DNA, 20 bp, synthetic construct
  source 1..20: mol_type = other DNA
actactgttgttagacgacg

SEQ ID NO: 5926 - DNA, 20 bp, synthetic construct
  source 1..20: mol_type = other DNA
actagatgttctggataata

SEQ ID NO: 5927 - DNA, 21 bp, synthetic construct
  source 1..21: mol_type = other DNA
actaggaggctgtaggcataa

SEQ ID NO: 5928 - DNA, 20 bp, synthetic construct
  source 1..20: mol_type = other DNA
actagtaaactgagccagga

SEQ ID NO: 5929 - DNA, 20 bp, synthetic construct
  source 1..20: mol_type = other DNA
actatttacacactctatgg

SEQ ID NO: 5930 - DNA, 21 bp, synthetic construct
  source 1..21: mol_type = other DNA
actcataaggtggggaacttt

SEQ ID NO: 5931 - DNA, 20 bp, synthetic construct
  source 1..20: mol_type = other DNA
actcccataggaattttccg

SEQ ID NO: 5932 - DNA, 20 bp, synthetic construct
  source 1..20: mol_type = other DNA
actccctcgcctcgcagacg

SEQ ID NO: 5933 - DNA, 21 bp, synthetic construct
  source 1..21: mol_type = other DNA
actcctccagcttatagacca

SEQ ID NO: 5934 - DNA, 20 bp, synthetic construct
  source 1..20: mol_type = other DNA
actcctcccagtctttaaac

SEQ ID NO: 5935 - DNA, 21 bp, synthetic construct
  source 1..21: mol_type = other DNA
actcctcccagtctttaaaca

SEQ ID NO: 5936 - DNA, 20 bp, synthetic construct
  source 1..20: mol_type = other DNA
actctaaggcttcccgatac

SEQ ID NO: 5937 - DNA, 21 bp, synthetic construct
  source 1..21: mol_type = other DNA
actctagctacctgggtgggt

SEQ ID NO: 5938 - DNA, 20 bp, synthetic construct
  source 1..20: mol_type = other DNA
actctgcaagatcccagagt

SEQ ID NO: 5939 - DNA, 20 bp, synthetic construct
  source 1..20: mol_type = other DNA
actctgttgtcctctcccgc

SEQ ID NO: 5940 - DNA, 20 bp, synthetic construct
  source 1..20: mol_type = other DNA
actgaaagccaaacagtggg

SEQ ID NO: 5941 - DNA, 20 bp, synthetic construct
  source 1..20: mol_type = other DNA
actgaacaaatggcactagt

SEQ ID NO: 5942 - DNA, 20 bp, synthetic construct
  source 1..20: mol_type = other DNA
actgaaggaaagaagtcaga

SEQ ID NO: 5943 - DNA, 20 bp, synthetic construct
  source 1..20: mol_type = other DNA
actggctggggcttggtcat

SEQ ID NO: 5944 - DNA, 20 bp, synthetic construct
  source 1..20: mol_type = other DNA
actgggaggagttgggggag

SEQ ID NO: 5945 - DNA, 20 bp, synthetic construct
  source 1..20: mol_type = other DNA
actgttgttagacgacgagg

SEQ ID NO: 5946 - DNA, 20 bp, synthetic construct
  source 1..20: mol_type = other DNA
actgtttgtttaaagactgg

SEQ ID NO: 5947 - DNA, 21 bp, synthetic construct
  source 1..21: mol_type = other DNA
actgtttgtttaaagactggg

SEQ ID NO: 5948 - DNA, 20 bp, synthetic construct
  source 1..20: mol_type = other DNA
acttacaaggcctttctgtg

SEQ ID NO: 5949 - DNA, 20 bp, synthetic construct
  source 1..20: mol_type = other DNA
acttacagttaatgagaaaa

SEQ ID NO: 5950 - DNA, 20 bp, synthetic construct
  source 1..20: mol_type = other DNA
acttcaaagactgtttgttt

SEQ ID NO: 5951 - DNA, 20 bp, synthetic construct
  source 1..20: mol_type = other DNA
acttccaatgacataaccca

SEQ ID NO: 5952 - DNA, 20 bp, synthetic construct
  source 1..20: mol_type = other DNA
acttctctcaattttctagg

SEQ ID NO: 5953 - DNA, 20 bp, synthetic construct
  source 1..20: mol_type = other DNA
actttctcgccaacttacaa

SEQ ID NO: 5954 - DNA, 20 bp, synthetic construct
  source 1..20: mol_type = other DNA
agaaaattggtaacagcggt

SEQ ID NO: 5955 - DNA, 20 bp, synthetic construct
  source 1..20: mol_type = other DNA
agaaaccgttatagagtatt

SEQ ID NO: 5956 - DNA, 20 bp, synthetic construct
  source 1..20: mol_type = other DNA
agaaaggccttgtaagttgg

SEQ ID NO: 5957 - DNA, 20 bp, synthetic construct
  source 1..20: mol_type = other DNA
agaacatcacatcaggattc

SEQ ID NO: 5958 - DNA, 20 bp, synthetic construct
  source 1..20: mol_type = other DNA
agaagaaccaacaagaagat

SEQ ID NO: 5959 - DNA, 20 bp, synthetic construct
  source 1..20: mol_type = other DNA
agaagaactccctcgcctcg

SEQ ID NO: 5960 - DNA, 20 bp, synthetic construct
  source 1..20: mol_type = other DNA
agaagatctcgtactgaagg

SEQ ID NO: 5961 - DNA, 20 bp, synthetic construct
  source 1..20: mol_type = other DNA
agaagatgaggcatagcagc

SEQ ID NO: 5962 - DNA, 20 bp, synthetic construct
  source 1..20: mol_type = other DNA
agaagattgacgataaggga

SEQ ID NO: 5963 - DNA, 20 bp, synthetic construct
  source 1..20: mol_type = other DNA
agaaggggacgagagagtcc

SEQ ID NO: 5964 - DNA, 20 bp, synthetic construct
  source 1..20: mol_type = other DNA
agaaggggtcctaggaatcc

SEQ ID NO: 5965 - DNA, 20 bp, synthetic construct
  source 1..20: mol_type = other DNA
agaagtcagaaggcaaaaac

SEQ ID NO: 5966 - DNA, 20 bp, synthetic construct
  source 1..20: mol_type = other DNA
agaatcctcacaataccgca

SEQ ID NO: 5967 - DNA, 20 bp, synthetic construct
  source 1..20: mol_type = other DNA
agacaaaagaaaattggtaa

SEQ ID NO: 5968 - DNA, 21 bp, synthetic construct
  source 1..21: mol_type = other DNA
agacaaaagaaaattggtaac

SEQ ID NO: 5969 - DNA, 20 bp, synthetic construct
  source 1..20: mol_type = other DNA
agacaagaaatgtgaaacca

SEQ ID NO: 5970 - DNA, 21 bp, synthetic construct
  source 1..21: mol_type = other DNA
agacaagaaatgtgaaaccac

SEQ ID NO: 5971 - DNA, 20 bp, synthetic construct
  source 1..20: mol_type = other DNA
agacacacggtagttccccc

SEQ ID NO: 5972 - DNA, 20 bp, synthetic construct
  source 1..20: mol_type = other DNA
agacacatccagcgataacc

SEQ ID NO: 5973 - DNA, 20 bp, synthetic construct
  source 1..20: mol_type = other DNA
agacaccaaatactctataa

SEQ ID NO: 5974 - DNA, 20 bp, synthetic construct
  source 1..20: mol_type = other DNA
agacaggtacagtagaagaa

SEQ ID NO: 5975 - DNA, 20 bp, synthetic construct
  source 1..20: mol_type = other DNA
agaccaccgtgaacgcccac

SEQ ID NO: 5976 - DNA, 20 bp, synthetic construct
  source 1..20: mol_type = other DNA
agacctgctgcgagcaaaac

SEQ ID NO: 5977 - DNA, 20 bp, synthetic construct
  source 1..20: mol_type = other DNA
agaccttcgtctgcgaggcg

SEQ ID NO: 5978 - DNA, 21 bp, synthetic construct
  source 1..21: mol_type = other DNA
agaccttcgtctgcgaggcga

SEQ ID NO: 5979 - DNA, 20 bp, synthetic construct
  source 1..20: mol_type = other DNA
agaccttgggcaacattcgg

SEQ ID NO: 5980 - DNA, 20 bp, synthetic construct
  source 1..20: mol_type = other DNA
agacgacgaggcaggtcccc

SEQ ID NO: 5981 - DNA, 20 bp, synthetic construct
  source 1..20: mol_type = other DNA
agacggagaaggggacgaga

SEQ ID NO: 5982 - DNA, 20 bp, synthetic construct
  source 1..20: mol_type = other DNA
agacggggagtccgcgtaaa

SEQ ID NO: 5983 - DNA, 21 bp, synthetic construct
  source 1..21: mol_type = other DNA
agacggggagtccgcgtaaag

SEQ ID NO: 5984 - DNA, 20 bp, synthetic construct
  source 1..20: mol_type = other DNA
agactgggaggagttggggg

SEQ ID NO: 5985 - DNA, 21 bp, synthetic construct
  source 1..21: mol_type = other DNA
agactgggaggagttggggga

SEQ ID NO: 5986 - DNA, 20 bp, synthetic construct
  source 1..20: mol_type = other DNA
agactgtttgtttaaagact

SEQ ID NO: 5987 - DNA, 20 bp, synthetic construct
  source 1..20: mol_type = other DNA
agagaagtccaccacgagtc

SEQ ID NO: 5988 - DNA, 20 bp, synthetic construct
  source 1..20: mol_type = other DNA
agagaggtgcgccccgtggt

SEQ ID NO: 5989 - DNA, 20 bp, synthetic construct
  source 1..20: mol_type = other DNA
agagagtcccaagcgacccc

SEQ ID NO: 5990 - DNA, 20 bp, synthetic construct
  source 1..20: mol_type = other DNA
agagatgattaggcagaggt

SEQ ID NO: 5991 - DNA, 20 bp, synthetic construct
  source 1..20: mol_type = other DNA
agagcaaacacagcaaatcc

SEQ ID NO: 5992 - DNA, 20 bp, synthetic construct
  source 1..20: mol_type = other DNA
agagctgaggcggtatctag

SEQ ID NO: 5993 - DNA, 20 bp, synthetic construct
  source 1..20: mol_type = other DNA
agaggaagatgataaaacgc

SEQ ID NO: 5994 - DNA, 20 bp, synthetic construct
  source 1..20: mol_type = other DNA
agaggcctgtatttccctgc

SEQ ID NO: 5995 - DNA, 20 bp, synthetic construct
  source 1..20: mol_type = other DNA
agagtatttggtgtctttcg

SEQ ID NO: 5996 - DNA, 20 bp, synthetic construct
  source 1..20: mol_type = other DNA
agagtcccaagcgaccccga

SEQ ID NO: 5997 - DNA, 21 bp, synthetic construct
  source 1..21: mol_type = other DNA
agagtcccaagcgaccccgag

SEQ ID NO: 5998 - DNA, 20 bp, synthetic construct
  source 1..20: mol_type = other DNA
agagtttggtgaaaggttgt

SEQ ID NO: 5999 - DNA, 20 bp, synthetic construct
  source 1..20: mol_type = other DNA
agatccagcatctagagacc

SEQ ID NO: 6000 - DNA, 21 bp, synthetic construct
  source 1..21: mol_type = other DNA
agatccagcatctagagacct

SEQ ID NO: 6001 - DNA, 20 bp, synthetic construct
  source 1..20: mol_type = other DNA
agatctcgtactgaaggaaa

SEQ ID NO: 6002 - DNA, 20 bp, synthetic construct
  source 1..20: mol_type = other DNA
agatcttctagataccgcct

SEQ ID NO: 6003 - DNA, 20 bp, synthetic construct
  source 1..20: mol_type = other DNA
agatcttgttcccaagaata

SEQ ID NO: 6004 - DNA, 20 bp, synthetic construct
  source 1..20: mol_type = other DNA
agatgagaaggcacagacgg

SEQ ID NO: 6005 - DNA, 20 bp, synthetic construct
  source 1..20: mol_type = other DNA
agatgattaggcagaggtga

SEQ ID NO: 6006 - DNA, 20 bp, synthetic construct
  source 1..20: mol_type = other DNA
agatgctggatcttccaaat

SEQ ID NO: 6007 - DNA, 21 bp, synthetic construct
  source 1..21: mol_type = other DNA
agatgctgtacagacttggcc

SEQ ID NO: 6008 - DNA, 20 bp, synthetic construct
  source 1..20: mol_type = other DNA
agattaaaggtctttgtact

SEQ ID NO: 6009 - DNA, 20 bp, synthetic construct
  source 1..20: mol_type = other DNA
agattgaatacatgcataca

SEQ ID NO: 6010 - DNA, 20 bp, synthetic construct
  source 1..20: mol_type = other DNA
agattgcaattgattatgcc

SEQ ID NO: 6011 - DNA, 20 bp, synthetic construct
  source 1..20: mol_type = other DNA
agcaaaacccaaaagaccca

SEQ ID NO: 6012 - DNA, 20 bp, synthetic construct
  source 1..20: mol_type = other DNA
agcaaatccgcctcctgcct

SEQ ID NO: 6013 - DNA, 20 bp, synthetic construct
  source 1..20: mol_type = other DNA
agcaacaggagggatacata

SEQ ID NO: 6014 - DNA, 21 bp, synthetic construct
  source 1..21: mol_type = other DNA
agcaattctttgctgggggga

SEQ ID NO: 6015 - DNA, 20 bp, synthetic construct
  source 1..20: mol_type = other DNA
agcagtagtcatgcaggttc

SEQ ID NO: 6016 - DNA, 20 bp, synthetic construct
  source 1..20: mol_type = other DNA
agccaccagcagggaaatac

SEQ ID NO: 6017 - DNA, 20 bp, synthetic construct
  source 1..20: mol_type = other DNA
agccacccaaggcacagctt

SEQ ID NO: 6018 - DNA, 20 bp, synthetic construct
  source 1..20: mol_type = other DNA
agccaggagaaacgggctga

SEQ ID NO: 6019 - DNA, 20 bp, synthetic construct
  source 1..20: mol_type = other DNA
agcccaggatgatgggatgg

SEQ ID NO: 6020 - DNA, 20 bp, synthetic construct
  source 1..20: mol_type = other DNA
agccctacgaaccactgaac

SEQ ID NO: 6021 - DNA, 20 bp, synthetic construct
  source 1..20: mol_type = other DNA
agccgaaaaggttccacgca

SEQ ID NO: 6022 - DNA, 20 bp, synthetic construct
  source 1..20: mol_type = other DNA
agcctgagggctccacccca

SEQ ID NO: 6023 - DNA, 20 bp, synthetic construct
  source 1..20: mol_type = other DNA
agccttcagagcaaacacag

SEQ ID NO: 6024 - DNA, 20 bp, synthetic construct
  source 1..20: mol_type = other DNA
agcgataaccaggacaagtt

SEQ ID NO: 6025 - DNA, 20 bp, synthetic construct
  source 1..20: mol_type = other DNA
agcgcagggtccccaatcct

SEQ ID NO: 6026 - DNA, 20 bp, synthetic construct
  source 1..20: mol_type = other DNA
agcgccgacgggacgtaaac

SEQ ID NO: 6027 - DNA, 21 bp, synthetic construct
  source 1..21: mol_type = other DNA
agcggctaggagttccgcagt

SEQ ID NO: 6028 - DNA, 21 bp, synthetic construct
  source 1..21: mol_type = other DNA
agctccaaattctttataagg

SEQ ID NO: 6029 - DNA, 20 bp, synthetic construct
  source 1..20: mol_type = other DNA
agctctgtatcgggaagcct

SEQ ID NO: 6030 - DNA, 20 bp, synthetic construct
  source 1..20: mol_type = other DNA
agctgtgccttgggtggctt

SEQ ID NO: 6031 - DNA, 20 bp, synthetic construct
  source 1..20: mol_type = other DNA
agcttggaggcttgaacagt

SEQ ID NO: 6032 - DNA, 20 bp, synthetic construct
  source 1..20: mol_type = other DNA
aggaaagaagtcagaaggca

SEQ ID NO: 6033 - DNA, 20 bp, synthetic construct
  source 1..20: mol_type = other DNA
aggaagatgataaaacgccg

SEQ ID NO: 6034 - DNA, 21 bp, synthetic construct
  source 1..21: mol_type = other DNA
aggaagttttctaaaacattc

SEQ ID NO: 6035 - DNA, 20 bp, synthetic construct
  source 1..20: mol_type = other DNA
aggaattttccgaaagccca

SEQ ID NO: 6036 - DNA, 21 bp, synthetic construct
  source 1..21: mol_type = other DNA
aggaattttccgaaagcccag

SEQ ID NO: 6037 - DNA, 20 bp, synthetic construct
  source 1..20: mol_type = other DNA
aggacaagttggaggacagg

SEQ ID NO: 6038 - DNA, 20 bp, synthetic construct
  source 1..20: mol_type = other DNA
aggaccccttctcgtgttac

SEQ ID NO: 6039 - DNA, 20 bp, synthetic construct
  source 1..20: mol_type = other DNA
aggacgtcccgcgcaggatc

SEQ ID NO: 6040 - DNA, 20 bp, synthetic construct
  source 1..20: mol_type = other DNA
aggagcagtaaaccctgttc

SEQ ID NO: 6041 - DNA, 20 bp, synthetic construct
  source 1..20: mol_type = other DNA
aggagctggagcattcgggc

SEQ ID NO: 6042 - DNA, 20 bp, synthetic construct
  source 1..20: mol_type = other DNA
aggaggcggatttgctggca

SEQ ID NO: 6043 - DNA, 20 bp, synthetic construct
  source 1..20: mol_type = other DNA
aggaggctgtaggcataaat

SEQ ID NO: 6044 - DNA, 20 bp, synthetic construct
  source 1..20: mol_type = other DNA
aggaggttggtgagtgattg

SEQ ID NO: 6045 - DNA, 20 bp, synthetic construct
  source 1..20: mol_type = other DNA
aggagtgcgaatccacactc

SEQ ID NO: 6046 - DNA, 21 bp, synthetic construct
  source 1..21: mol_type = other DNA
gaactccctcgcctcgcagac

SEQ ID NO: 6047 - DNA, 20 bp, synthetic construct
  source 1..20: mol_type = other DNA
aggagttgggggaggagatt

SEQ ID NO: 6048 - DNA, 20 bp, synthetic construct
  source 1..20: mol_type = other DNA
aggatcctcaaccaccagca

SEQ ID NO: 6049 - DNA, 20 bp, synthetic construct
  source 1..20: mol_type = other DNA
aggatcctggaattagagga

SEQ ID NO: 6050 - DNA, 20 bp, synthetic construct
  source 1..20: mol_type = other DNA
aggatgaagaggaagatgat

SEQ ID NO: 6051 - DNA, 20 bp, synthetic construct
  source 1..20: mol_type = other DNA
aggatgatgggatgggaata

SEQ ID NO: 6052 - DNA, 20 bp, synthetic construct
  source 1..20: mol_type = other DNA
aggattaaagacaggtacag

SEQ ID NO: 6053 - DNA, 20 bp, synthetic construct
  source 1..20: mol_type = other DNA
aggattcttgtcaacaagaa

SEQ ID NO: 6054 - DNA, 20 bp, synthetic construct
  source 1..20: mol_type = other DNA
aggattggggaccctgcgct

SEQ ID NO: 6055 - DNA, 21 bp, synthetic construct
  source 1..21: mol_type = other DNA
aggcaaaaacgagagtaactc

SEQ ID NO: 6056 - DNA, 20 bp, synthetic construct
  source 1..20: mol_type = other DNA
aggcaagcaattctttgctg

SEQ ID NO: 6057 - DNA, 20 bp, synthetic construct
  source 1..20: mol_type = other DNA
aggcaggaggcggatttgct

SEQ ID NO: 6058 - DNA, 20 bp, synthetic construct
  source 1..20: mol_type = other DNA
aggcaggtcccctagaagaa

SEQ ID NO: 6059 - DNA, 20 bp, synthetic construct
  source 1..20: mol_type = other DNA
aggcatagcagcaggatgaa

SEQ ID NO: 6060 - DNA, 20 bp, synthetic construct
  source 1..20: mol_type = other DNA
aggcccacttacagttaatg

SEQ ID NO: 6061 - DNA, 20 bp, synthetic construct
  source 1..20: mol_type = other DNA
aggcctccgtgcggtggggt

SEQ ID NO: 6062 - DNA, 20 bp, synthetic construct
  source 1..20: mol_type = other DNA
aggccttgtaagttggcgag

SEQ ID NO: 6063 - DNA, 20 bp, synthetic construct
  source 1..20: mol_type = other DNA
aggcgagggagttcttcttc

SEQ ID NO: 6064 - DNA, 20 bp, synthetic construct
  source 1..20: mol_type = other DNA
aggcgggtatattatataag

SEQ ID NO: 6065 - DNA, 21 bp, synthetic construct
  source 1..21: mol_type = other DNA
aggctgccttcctgtctggcg

SEQ ID NO: 6066 - DNA, 20 bp, synthetic construct
  source 1..20: mol_type = other DNA
aggcttcccgatacagagct

SEQ ID NO: 6067 - DNA, 20 bp, synthetic construct
  source 1..20: mol_type = other DNA
aggcttgaacagtaggacat

SEQ ID NO: 6068 - DNA, 20 bp, synthetic construct
  source 1..20: mol_type = other DNA
agggactcaagatgctgtac

SEQ ID NO: 6069 - DNA, 21 bp, synthetic construct
  source 1..21: mol_type = other DNA
agggagaggcagtagtcggaa

SEQ ID NO: 6070 - DNA, 20 bp, synthetic construct
  source 1..20: mol_type = other DNA
agggatacatagaggttcct

SEQ ID NO: 6071 - DNA, 20 bp, synthetic construct
  source 1..20: mol_type = other DNA
agggctttcccccactgttt

SEQ ID NO: 6072 - DNA, 20 bp, synthetic construct
  source 1..20: mol_type = other DNA
aggggacctgcctcgtcgtc

SEQ ID NO: 6073 - DNA, 20 bp, synthetic construct
  source 1..20: mol_type = other DNA
aggggcatttggtggtctat

SEQ ID NO: 6074 - DNA, 20 bp, synthetic construct
  source 1..20: mol_type = other DNA
agggtccccaatcctcgaga

SEQ ID NO: 6075 - DNA, 20 bp, synthetic construct
  source 1..20: mol_type = other DNA
agggtcgatgtccatgcccc

SEQ ID NO: 6076 - DNA, 20 bp, synthetic construct
  source 1..20: mol_type = other DNA
agggtttaaatgtataccca

SEQ ID NO: 6077 - DNA, 20 bp, synthetic construct
  source 1..20: mol_type = other DNA
agggtttactgctcctgaac

SEQ ID NO: 6078 - DNA, 21 bp, synthetic construct
  source 1..21: mol_type = other DNA
aggtacagtagaagaataaag

SEQ ID NO: 6079 - DNA, 20 bp, synthetic construct
  source 1..20: mol_type = other DNA
aggtaggagctggagcattc

SEQ ID NO: 6080 - DNA, 21 bp, synthetic construct
  source 1..21: mol_type = other DNA
aggtatgttgcccgtttgtcc

SEQ ID NO: 6081 - DNA, 20 bp, synthetic construct
  source 1..20: mol_type = other DNA
aggtattgtttacacagaaa

SEQ ID NO: 6082 - DNA, 20 bp, synthetic construct
  source 1..20: mol_type = other DNA
aggtcggtcgttgacattgc

SEQ ID NO: 6083 - DNA, 21 bp, synthetic construct
  source 1..21: mol_type = other DNA
aggtcggtcgttgacattgca

SEQ ID NO: 6084 - DNA, 20 bp, synthetic construct
  source 1..20: mol_type = other DNA
aggtctcaatcgccgcgtcg

SEQ ID NO: 6085 - DNA, 20 bp, synthetic construct
  source 1..20: mol_type = other DNA
aggtctggagcaaacattat

SEQ ID NO: 6086 - DNA, 20 bp, synthetic construct
  source 1..20: mol_type = other DNA
aggtgcgccccgtggtcggt

SEQ ID NO: 6087 - DNA, 20 bp, synthetic construct
  source 1..20: mol_type = other DNA
aggtgtccttgttgggattg

SEQ ID NO: 6088 - DNA, 20 bp, synthetic construct
  source 1..20: mol_type = other DNA
aggttcaggtattgtttaca

SEQ ID NO: 6089 - DNA, 20 bp, synthetic construct
  source 1..20: mol_type = other DNA
aggttccacgcacgcgctga

SEQ ID NO: 6090 - DNA, 20 bp, synthetic construct
  source 1..20: mol_type = other DNA
aggttggggactgcgaattt

SEQ ID NO: 6091 - DNA, 20 bp, synthetic construct
  source 1..20: mol_type = other DNA
aggtttggtacagcaacagg

SEQ ID NO: 6092 - DNA, 20 bp, synthetic construct
  source 1..20: mol_type = other DNA
aggttttatccaaaggttac

SEQ ID NO: 6093 - DNA, 20 bp, synthetic construct
  source 1..20: mol_type = other DNA
agtaaagttccccaccttat

SEQ ID NO: 6094 - DNA, 20 bp, synthetic construct
  source 1..20: mol_type = other DNA
agtaactccacagtagctcc

SEQ ID NO: 6095 - DNA, 21 bp, synthetic construct
  source 1..21: mol_type = other DNA
agtaatgattaactagatgtt

SEQ ID NO: 6096 - DNA, 20 bp, synthetic construct
  source 1..20: mol_type = other DNA
agtagaagaataaagaccag

SEQ ID NO: 6097 - DNA, 20 bp, synthetic construct
  source 1..20: mol_type = other DNA
agtagctccaaattctttat

SEQ ID NO: 6098 - DNA, 20 bp, synthetic construct
  source 1..20: mol_type = other DNA
agtaggacatgaacaagaga

SEQ ID NO: 6099 - DNA, 20 bp, synthetic construct
  source 1..20: mol_type = other DNA
agtagtttccggaagtgttg

SEQ ID NO: 6100 - DNA, 21 bp, synthetic construct
  source 1..21: mol_type = other DNA
agtagtttccggaagtgttga

SEQ ID NO: 6101 - DNA, 20 bp, synthetic construct
  source 1..20: mol_type = other DNA
agtcattagttccccccagc

SEQ ID NO: 6102 - DNA, 21 bp, synthetic construct
  source 1..21: mol_type = other DNA
agtcattagttccccccagca

SEQ ID NO: 6103 - DNA, 20 bp, synthetic construct
  source 1..20: mol_type = other DNA
agtccaagagtcctcttatg

SEQ ID NO: 6104 - DNA, 20 bp, synthetic construct
  source 1..20: mol_type = other DNA
agtccaaggaatactaacat

SEQ ID NO: 6105 - DNA, 20 bp, synthetic construct
  source 1..20: mol_type = other DNA
agtccagaagaaccaacaag

SEQ ID NO: 6106 - DNA, 20 bp, synthetic construct
  source 1..20: mol_type = other DNA
agtcccaagcgaccccgaga

SEQ ID NO: 6107 - DNA, 20 bp, synthetic construct
  source 1..20: mol_type = other DNA
agtccccaacctccaatcac

SEQ ID NO: 6108 - DNA, 20 bp, synthetic construct
  source 1..20: mol_type = other DNA
agtcccgataatgtttgctc

SEQ ID NO: 6109 - DNA, 20 bp, synthetic construct
  source 1..20: mol_type = other DNA
agtccgcgtaaagagaggtg

SEQ ID NO: 6110 - DNA, 20 bp, synthetic construct
  source 1..20: mol_type = other DNA
agtcctcttatgtaagacct

SEQ ID NO: 6111 - DNA, 21 bp, synthetic construct
  source 1..21: mol_type = other DNA
agtctttaaacaaacagtctt

SEQ ID NO: 6112 - DNA, 20 bp, synthetic construct
  source 1..20: mol_type = other DNA
agtctttgaagtatgcctca

SEQ ID NO: 6113 - DNA, 20 bp, synthetic construct
  source 1..20: mol_type = other DNA
agtgaaagcctgcttagatt

SEQ ID NO: 6114 - DNA, 20 bp, synthetic construct
  source 1..20: mol_type = other DNA
agtgattggaggttggggac

SEQ ID NO: 6115 - DNA, 21 bp, synthetic construct
  source 1..21: mol_type = other DNA
agtgattggaggttggggact

SEQ ID NO: 6116 - DNA, 20 bp, synthetic construct
  source 1..20: mol_type = other DNA
agtgcacacggtccggcaga

SEQ ID NO: 6117 - DNA, 20 bp, synthetic construct
  source 1..20: mol_type = other DNA
agtgcgaatccacactccga

SEQ ID NO: 6118 - DNA, 20 bp, synthetic construct
  source 1..20: mol_type = other DNA
agtgtctagtttggaagtaa

SEQ ID NO: 6119 - DNA, 20 bp, synthetic construct
  source 1..20: mol_type = other DNA
agtgtggattcgcactcctc

SEQ ID NO: 6120 - DNA, 21 bp, synthetic construct
  source 1..21: mol_type = other DNA
agtgttgataggataggggca

SEQ ID NO: 6121 - DNA, 20 bp, synthetic construct
  source 1..20: mol_type = other DNA
agttaatgagaaaagaagat

SEQ ID NO: 6122 - DNA, 20 bp, synthetic construct
  source 1..20: mol_type = other DNA
agttatgggtccttgccaca

SEQ ID NO: 6123 - DNA, 20 bp, synthetic construct
  source 1..20: mol_type = other DNA
agttatgtcaacactaatat

SEQ ID NO: 6124 - DNA, 20 bp, synthetic construct
  source 1..20: mol_type = other DNA
agttccccaccttatgagtc

SEQ ID NO: 6125 - DNA, 20 bp, synthetic construct
  source 1..20: mol_type = other DNA
agttccccccagcaaagaat

SEQ ID NO: 6126 - DNA, 20 bp, synthetic construct
  source 1..20: mol_type = other DNA
agttccccctagaaaattga

SEQ ID NO: 6127 - DNA, 21 bp, synthetic construct
  source 1..21: mol_type = other DNA
agttccccctagaaaattgag

SEQ ID NO: 6128 - DNA, 20 bp, synthetic construct
  source 1..20: mol_type = other DNA
agttccgcagtatggatcgg

SEQ ID NO: 6129 - DNA, 20 bp, synthetic construct
  source 1..20: mol_type = other DNA
agttcttcttctaggggacc

SEQ ID NO: 6130 - DNA, 20 bp, synthetic construct
  source 1..20: mol_type = other DNA
agttgcatggtgctggtgcg

SEQ ID NO: 6131 - DNA, 20 bp, synthetic construct
  source 1..20: mol_type = other DNA
agttggcagcacagcctagc

SEQ ID NO: 6132 - DNA, 20 bp, synthetic construct
  source 1..20: mol_type = other DNA
agtttccggaagtgttgata

SEQ ID NO: 6133 - DNA, 21 bp, synthetic construct
  source 1..21: mol_type = other DNA
ataaagaatttggagctactg

SEQ ID NO: 6134 - DNA, 20 bp, synthetic construct
  source 1..20: mol_type = other DNA
ataaattggtctgcgcacca

SEQ ID NO: 6135 - DNA, 20 bp, synthetic construct
  source 1..20: mol_type = other DNA
ataaccacattgtgtaaatg

SEQ ID NO: 6136 - DNA, 20 bp, synthetic construct
  source 1..20: mol_type = other DNA
ataactctgttgtcctctcc

SEQ ID NO: 6137 - DNA, 21 bp, synthetic construct
  source 1..21: mol_type = other DNA
ataactctgttgtcctctccc

SEQ ID NO: 6138 - DNA, 20 bp, synthetic construct
  source 1..20: mol_type = other DNA
ataactgaaagccaaacagt

SEQ ID NO: 6139 - DNA, 20 bp, synthetic construct
  source 1..20: mol_type = other DNA
ataactgactactaggtctc

SEQ ID NO: 6140 - DNA, 20 bp, synthetic construct
  source 1..20: mol_type = other DNA
ataagagagaaacaacacat

SEQ ID NO: 6141 - DNA, 20 bp, synthetic construct
  source 1..20: mol_type = other DNA
ataagggagaggcagtagtc

SEQ ID NO: 6142 - DNA, 20 bp, synthetic construct
  source 1..20: mol_type = other DNA
ataatatacccgccttccat

SEQ ID NO: 6143 - DNA, 20 bp, synthetic construct
  source 1..20: mol_type = other DNA
atacaggtgcaatttccgtc

SEQ ID NO: 6144 - DNA, 21 bp, synthetic construct
  source 1..21: mol_type = other DNA
atacaggtgcaatttccgtcc

SEQ ID NO: 6145 - DNA, 20 bp, synthetic construct
  source 1..20: mol_type = other DNA
atacatagaggttccttgag

SEQ ID NO: 6146 - DNA, 21 bp, synthetic construct
  source 1..21: mol_type = other DNA
atacatagaggttccttgagc

SEQ ID NO: 6147 - DNA, 20 bp, synthetic construct
  source 1..20: mol_type = other DNA
atacatgcatacaagggcat

SEQ ID NO: 6148 - DNA, 20 bp, synthetic construct
  source 1..20: mol_type = other DNA
ataccgcctcagctctgtat

SEQ ID NO: 6149 - DNA, 20 bp, synthetic construct
  source 1..20: mol_type = other DNA
atacgatgtatatttgcggg

SEQ ID NO: 6150 - DNA, 20 bp, synthetic construct
  source 1..20: mol_type = other DNA
atactaacattgaggttccc

SEQ ID NO: 6151 - DNA, 20 bp, synthetic construct
  source 1..20: mol_type = other DNA
atactacaaactttgccagc

SEQ ID NO: 6152 - DNA, 20 bp, synthetic construct
  source 1..20: mol_type = other DNA
atagagtatttggtgtcttt

SEQ ID NO: 6153 - DNA, 20 bp, synthetic construct
  source 1..20: mol_type = other DNA
atagcagcaggatgaagagg

SEQ ID NO: 6154 - DNA, 20 bp, synthetic construct
  source 1..20: mol_type = other DNA
atagcgcctcattttgtggg

SEQ ID NO: 6155 - DNA, 20 bp, synthetic construct
  source 1..20: mol_type = other DNA
ataggaattttccgaaagcc

SEQ ID NO: 6156 - DNA, 20 bp, synthetic construct
  source 1..20: mol_type = other DNA
atagtccagaagaaccaaca

SEQ ID NO: 6157 - DNA, 21 bp, synthetic construct
  source 1..21: mol_type = other DNA
atagtccagaagaaccaacaa

SEQ ID NO: 6158 - DNA, 21 bp, synthetic construct
  source 1..21: mol_type = other DNA
atataatatacccgccttcca

SEQ ID NO: 6159 - DNA, 20 bp, synthetic construct
  source 1..20: mol_type = other DNA
atatacatcgtatccatggc

SEQ ID NO: 6160 - DNA, 20 bp, synthetic construct
  source 1..20: mol_type = other DNA
atatggatgatgtggtattg

SEQ ID NO: 6161 - DNA, 20 bp, synthetic construct
  source 1..20: mol_type = other DNA
atatgggcctaaagttcagg

SEQ ID NO: 6162 - DNA, 20 bp, synthetic construct
  source 1..20: mol_type = other DNA
atatggtgacccacaaaatg

SEQ ID NO: 6163 - DNA, 20 bp, synthetic construct
  source 1..20: mol_type = other DNA
atatttgcgggagaggacaa

SEQ ID NO: 6164 - DNA, 20 bp, synthetic construct
  source 1..20: mol_type = other DNA
atatttggtaacctttggat

SEQ ID NO: 6165 - DNA, 20 bp, synthetic construct
  source 1..20: mol_type = other DNA
atcaataggcctgttaatag

SEQ ID NO: 6166 - DNA, 20 bp, synthetic construct
  source 1..20: mol_type = other DNA
atccaaaggttaccaaatat

SEQ ID NO: 6167 - DNA, 20 bp, synthetic construct
  source 1..20: mol_type = other DNA
atccaactggtggtcgggaa

SEQ ID NO: 6168 - DNA, 20 bp, synthetic construct
  source 1..20: mol_type = other DNA
atccaatggtaaatatttgg

SEQ ID NO: 6169 - DNA, 20 bp, synthetic construct
  source 1..20: mol_type = other DNA
atccacactccgaaagacac

SEQ ID NO: 6170 - DNA, 20 bp, synthetic construct
  source 1..20: mol_type = other DNA
atccagttggcagcacagcc

SEQ ID NO: 6171 - DNA, 20 bp, synthetic construct
  source 1..20: mol_type = other DNA
atccatactgcggaactcct

SEQ ID NO: 6172 - DNA, 20 bp, synthetic construct
  source 1..20: mol_type = other DNA
atcccagaggattgctggtg

SEQ ID NO: 6173 - DNA, 21 bp, synthetic construct
  source 1..21: mol_type = other DNA
atcccagaggattgctggtgg

SEQ ID NO: 6174 - DNA, 20 bp, synthetic construct
  source 1..20: mol_type = other DNA
atcccatcatcctgggcttt

SEQ ID NO: 6175 - DNA, 20 bp, synthetic construct
  source 1..20: mol_type = other DNA
atccctcctgttgctgtacc

SEQ ID NO: 6176 - DNA, 20 bp, synthetic construct
  source 1..20: mol_type = other DNA
atcctcgagaagattgacga

SEQ ID NO: 6177 - DNA, 20 bp, synthetic construct
  source 1..20: mol_type = other DNA
atcctgcggacgacccttct

SEQ ID NO: 6178 - DNA, 20 bp, synthetic construct
  source 1..20: mol_type = other DNA
atcgacccttataaagaatt

SEQ ID NO: 6179 - DNA, 20 bp, synthetic construct
  source 1..20: mol_type = other DNA
atctagaagatctcgtactg

SEQ ID NO: 6180 - DNA, 20 bp, synthetic construct
  source 1..20: mol_type = other DNA
atctagttaatcattacttc

SEQ ID NO: 6181 - DNA, 21 bp, synthetic construct
  source 1..21: mol_type = other DNA
atctctttgttttgttagggt

SEQ ID NO: 6182 - DNA, 21 bp, synthetic construct
  source 1..21: mol_type = other DNA
atcttccaaattaacacccac

SEQ ID NO: 6183 - DNA, 20 bp, synthetic construct
  source 1..20: mol_type = other DNA
atcttctgcgacgcggcgat

SEQ ID NO: 6184 - DNA, 20 bp, synthetic construct
  source 1..20: mol_type = other DNA
atcttcttgttggttcttct

SEQ ID NO: 6185 - DNA, 20 bp, synthetic construct
  source 1..20: mol_type = other DNA
atcttgcagagtttggtgaa

SEQ ID NO: 6186 - DNA, 21 bp, synthetic construct
  source 1..21: mol_type = other DNA
atctttccaccagcaatcctc

SEQ ID NO: 6187 - DNA, 20 bp, synthetic construct
  source 1..20: mol_type = other DNA
atgaacaagagatgattagg

SEQ ID NO: 6188 - DNA, 21 bp, synthetic construct
  source 1..21: mol_type = other DNA
atgaacaagagatgattaggc

SEQ ID NO: 6189 - DNA, 20 bp, synthetic construct
  source 1..20: mol_type = other DNA
atgacataacccataaaatt

SEQ ID NO: 6190 - DNA, 20 bp, synthetic construct
  source 1..20: mol_type = other DNA
atgaccaagccccagccagt

SEQ ID NO: 6191 - DNA, 20 bp, synthetic construct
  source 1..20: mol_type = other DNA
atgactctagctacctgggt

SEQ ID NO: 6192 - DNA, 20 bp, synthetic construct
  source 1..20: mol_type = other DNA
atgaggattaaagacaggta

SEQ ID NO: 6193 - DNA, 20 bp, synthetic construct
  source 1..20: mol_type = other DNA
atgaggcatagcagcaggat

SEQ ID NO: 6194 - DNA, 20 bp, synthetic construct
  source 1..20: mol_type = other DNA
atgagtgtttctcaaaggtg

SEQ ID NO: 6195 - DNA, 21 bp, synthetic construct
  source 1..21: mol_type = other DNA
atgatgggatgggaatacagg

SEQ ID NO: 6196 - DNA, 20 bp, synthetic construct
  source 1..20: mol_type = other DNA
atgatgtggtattgggggcc

SEQ ID NO: 6197 - DNA, 20 bp, synthetic construct
  source 1..20: mol_type = other DNA
atgatgtgttcttgtggcaa

SEQ ID NO: 6198 - DNA, 20 bp, synthetic construct
  source 1..20: mol_type = other DNA
atgattaggcagaggtgaaa

SEQ ID NO: 6199 - DNA, 20 bp, synthetic construct
  source 1..20: mol_type = other DNA
atgcatacaagggcattaac

SEQ ID NO: 6200 - DNA, 21 bp, synthetic construct
  source 1..21: mol_type = other DNA
atgcatacaagggcattaacg

SEQ ID NO: 6201 - DNA, 20 bp, synthetic construct
  source 1..20: mol_type = other DNA
atgcatgtattcaatctaag

SEQ ID NO: 6202 - DNA, 20 bp, synthetic construct
  source 1..20: mol_type = other DNA
atgcctacagcctcctagta

SEQ ID NO: 6203 - DNA, 20 bp, synthetic construct
  source 1..20: mol_type = other DNA
atgcctgctaggttttatcc

SEQ ID NO: 6204 - DNA, 21 bp, synthetic construct
  source 1..21: mol_type = other DNA
atgcgacgtgcagaggtgaag

SEQ ID NO: 6205 - DNA, 20 bp, synthetic construct
  source 1..20: mol_type = other DNA
atgctgtagatcttgttccc

SEQ ID NO: 6206 - DNA, 20 bp, synthetic construct
  source 1..20: mol_type = other DNA
atggacatcgacccttataa

SEQ ID NO: 6207 - DNA, 20 bp, synthetic construct
  source 1..20: mol_type = other DNA
atggatacgatgtatatttg

SEQ ID NO: 6208 - DNA, 20 bp, synthetic construct
  source 1..20: mol_type = other DNA
atggatcggcagaggagccg

SEQ ID NO: 6209 - DNA, 21 bp, synthetic construct
  source 1..21: mol_type = other DNA
atggatcggcagaggagccga

SEQ ID NO: 6210 - DNA, 20 bp, synthetic construct
  source 1..20: mol_type = other DNA
atggatgatgtggtattggg

SEQ ID NO: 6211 - DNA, 20 bp, synthetic construct
  source 1..20: mol_type = other DNA
atggcactagtaaactgagc

SEQ ID NO: 6212 - DNA, 20 bp, synthetic construct
  source 1..20: mol_type = other DNA
atggcccatgaccaagcccc

SEQ ID NO: 6213 - DNA, 21 bp, synthetic construct
  source 1..21: mol_type = other DNA
atggcccatgaccaagcccca

SEQ ID NO: 6214 - DNA, 20 bp, synthetic construct
  source 1..20: mol_type = other DNA
atgggatgggaatacaggtg

SEQ ID NO: 6215 - DNA, 20 bp, synthetic construct
  source 1..20: mol_type = other DNA
atgggccatcagcgcgtgcg

SEQ ID NO: 6216 - DNA, 20 bp, synthetic construct
  source 1..20: mol_type = other DNA
atggggcagaatctttccac

SEQ ID NO: 6217 - DNA, 21 bp, synthetic construct
  source 1..21: mol_type = other DNA
atggggcagaatctttccacc

SEQ ID NO: 6218 - DNA, 20 bp, synthetic construct
  source 1..20: mol_type = other DNA
atggggcagcaaaacccaaa

SEQ ID NO: 6219 - DNA, 21 bp, synthetic construct
  source 1..21: mol_type = other DNA
atggtaaatatttggtaacct

SEQ ID NO: 6220 - DNA, 20 bp, synthetic construct
  source 1..20: mol_type = other DNA
atggtcccgtgctggtggtt

SEQ ID NO: 6221 - DNA, 20 bp, synthetic construct
  source 1..20: mol_type = other DNA
atggtgaggtgaacaatgct

SEQ ID NO: 6222 - DNA, 20 bp, synthetic construct
  source 1..20: mol_type = other DNA
atgtatacccaaagacaaaa

SEQ ID NO: 6223 - DNA, 21 bp, synthetic construct
  source 1..21: mol_type = other DNA
atgtcaacactaatatgggcc

SEQ ID NO: 6224 - DNA, 20 bp, synthetic construct
  source 1..20: mol_type = other DNA
atgtcaacgaccgaccttga

SEQ ID NO: 6225 - DNA, 20 bp, synthetic construct
  source 1..20: mol_type = other DNA
atgtgatgttctccatgttc

SEQ ID NO: 6226 - DNA, 20 bp, synthetic construct
  source 1..20: mol_type = other DNA
atgtggttatcctgcgttaa

SEQ ID NO: 6227 - DNA, 20 bp, synthetic construct
  source 1..20: mol_type = other DNA
atgttctccatgttcagcgc

SEQ ID NO: 6228 - DNA, 20 bp, synthetic construct
  source 1..20: mol_type = other DNA
atgttctggataataaggtt

SEQ ID NO: 6229 - DNA, 20 bp, synthetic construct
  source 1..20: mol_type = other DNA
atgttgcccaaggtcttaca

SEQ ID NO: 6230 - DNA, 20 bp, synthetic construct
  source 1..20: mol_type = other DNA
attaaagacaggtacagtag

SEQ ID NO: 6231 - DNA, 20 bp, synthetic construct
  source 1..20: mol_type = other DNA
attaaaggtctttgtactag

SEQ ID NO: 6232 - DNA, 21 bp, synthetic construct
  source 1..21: mol_type = other DNA
attaacacccacccaggtagc

SEQ ID NO: 6233 - DNA, 20 bp, synthetic construct
  source 1..20: mol_type = other DNA
attaacaggcctattgattg

SEQ ID NO: 6234 - DNA, 20 bp, synthetic construct
  source 1..20: mol_type = other DNA
attaactgtaagtgggccta

SEQ ID NO: 6235 - DNA, 20 bp, synthetic construct
  source 1..20: mol_type = other DNA
attcagcgccgacgggacgt

SEQ ID NO: 6236 - DNA, 20 bp, synthetic construct
  source 1..20: mol_type = other DNA
attccaggatcctcaaccac

SEQ ID NO: 6237 - DNA, 20 bp, synthetic construct
  source 1..20: mol_type = other DNA
attcccatcccatcatcctg

SEQ ID NO: 6238 - DNA, 20 bp, synthetic construct
  source 1..20: mol_type = other DNA
attcctatgggagtgggcct

SEQ ID NO: 6239 - DNA, 20 bp, synthetic construct
  source 1..20: mol_type = other DNA
attccttggactcataaggt

SEQ ID NO: 6240 - DNA, 20 bp, synthetic construct
  source 1..20: mol_type = other DNA
attcgcactcctccagctta

SEQ ID NO: 6241 - DNA, 20 bp, synthetic construct
  source 1..20: mol_type = other DNA
attcttgggaacaagatcta

SEQ ID NO: 6242 - DNA, 20 bp, synthetic construct
  source 1..20: mol_type = other DNA
attctttcccgaccaccagt

SEQ ID NO: 6243 - DNA, 20 bp, synthetic construct
  source 1..20: mol_type = other DNA
attgaatacatgcatacaag

SEQ ID NO: 6244 - DNA, 20 bp, synthetic construct
  source 1..20: mol_type = other DNA
attgagaccttcgtctgcga

SEQ ID NO: 6245 - DNA, 20 bp, synthetic construct
  source 1..20: mol_type = other DNA
attgagatcttctgcgacgc

SEQ ID NO: 6246 - DNA, 20 bp, synthetic construct
  source 1..20: mol_type = other DNA
attgggacttcaatcccaac

SEQ ID NO: 6247 - DNA, 20 bp, synthetic construct
  source 1..20: mol_type = other DNA
attgggggccaagtctgtac

SEQ ID NO: 6248 - DNA, 20 bp, synthetic construct
  source 1..20: mol_type = other DNA
attggtaacagcggtaaaaa

SEQ ID NO: 6249 - DNA, 20 bp, synthetic construct
  source 1..20: mol_type = other DNA
attgtgaggattcttgtcaa

SEQ ID NO: 6250 - DNA, 20 bp, synthetic construct
  source 1..20: mol_type = other DNA
attgtgggtcttttgggttt

SEQ ID NO: 6251 - DNA, 20 bp, synthetic construct
  source 1..20: mol_type = other DNA
attgtgtaaatggggcagca

SEQ ID NO: 6252 - DNA, 20 bp, synthetic construct
  source 1..20: mol_type = other DNA
atttaaaccctaacaaaaca

SEQ ID NO: 6253 - DNA, 21 bp, synthetic construct
  source 1..21: mol_type = other DNA
atttaaaccctaacaaaacaa

SEQ ID NO: 6254 - DNA, 20 bp, synthetic construct
  source 1..20: mol_type = other DNA
atttacaccaagacattatc

SEQ ID NO: 6255 - DNA, 21 bp, synthetic construct
  source 1..21: mol_type = other DNA
atttacaccaagacattatca

SEQ ID NO: 6256 - DNA, 20 bp, synthetic construct
  source 1..20: mol_type = other DNA
atttcttgtctcacttttgg

SEQ ID NO: 6257 - DNA, 20 bp, synthetic construct
  source 1..20: mol_type = other DNA
atttgcgggagaggacaaca

SEQ ID NO: 6258 - DNA, 20 bp, synthetic construct
  source 1..20: mol_type = other DNA
atttgctgtgtttgctctga

SEQ ID NO: 6259 - DNA, 20 bp, synthetic construct
  source 1..20: mol_type = other DNA
atttggaagatccagcatct

SEQ ID NO: 6260 - DNA, 20 bp, synthetic construct
  source 1..20: mol_type = other DNA
atttggtggtctataagctg

SEQ ID NO: 6261 - DNA, 21 bp, synthetic construct
  source 1..21: mol_type = other DNA
atttggtggtctataagctgg

SEQ ID NO: 6262 - DNA, 20 bp, synthetic construct
  source 1..20: mol_type = other DNA
atttggtgtctttcggagtg

SEQ ID NO: 6263 - DNA, 20 bp, synthetic construct
  source 1..20: mol_type = other DNA
atttgttcagtggttcgtag

SEQ ID NO: 6264 - DNA, 20 bp, synthetic construct
  source 1..20: mol_type = other DNA
attttatgggttatgtcatt

SEQ ID NO: 6265 - DNA, 20 bp, synthetic construct
  source 1..20: mol_type = other DNA
attttggccaagacacacgg

SEQ ID NO: 6266 - DNA, 21 bp, synthetic construct
  source 1..21: mol_type = other DNA
attttttgataatgtcttggt

SEQ ID NO: 6267 - DNA, 20 bp, synthetic construct
  source 1..20: mol_type = other DNA
caaaaaatcaaagaatgttt

SEQ ID NO: 6268 - DNA, 20 bp, synthetic construct
  source 1..20: mol_type = other DNA
caaaaaatgtgaacagtttg

SEQ ID NO: 6269 - DNA, 20 bp, synthetic construct
  source 1..20: mol_type = other DNA
caaaaacgagagtaactcca

SEQ ID NO: 6270 - DNA, 20 bp, synthetic construct
  source 1..20: mol_type = other DNA
caaaagaaaattggtaacag

SEQ ID NO: 6271 - DNA, 20 bp, synthetic construct
  source 1..20: mol_type = other DNA
caaaaggcctccgtgcggtg

SEQ ID NO: 6272 - DNA, 20 bp, synthetic construct
  source 1..20: mol_type = other DNA
caaaagtgagacaagaaatg

SEQ ID NO: 6273 - DNA, 21 bp, synthetic construct
  source 1..21: mol_type = other DNA
caaaattcgcagtccccaacc

SEQ ID NO: 6274 - DNA, 20 bp, synthetic construct
  source 1..20: mol_type = other DNA
caaacacagcaaatccagat

SEQ ID NO: 6275 - DNA, 20 bp, synthetic construct
  source 1..20: mol_type = other DNA
caaacacttggcacagacct

SEQ ID NO: 6276 - DNA, 20 bp, synthetic construct
  source 1..20: mol_type = other DNA
caaagaattgcttgcctgag

SEQ ID NO: 6277 - DNA, 20 bp, synthetic construct
  source 1..20: mol_type = other DNA
caaagacaaaagaaaattgg

SEQ ID NO: 6278 - DNA, 21 bp, synthetic construct
  source 1..21: mol_type = other DNA
caaaggacgtcccgcgcagga

SEQ ID NO: 6279 - DNA, 20 bp, synthetic construct
  source 1..20: mol_type = other DNA
caaaggtggagacagcgggg

SEQ ID NO: 6280 - DNA, 20 bp, synthetic construct
  source 1..20: mol_type = other DNA
caaagtttgtagtatgccct

SEQ ID NO: 6281 - DNA, 20 bp, synthetic construct
  source 1..20: mol_type = other DNA
caaatatacatcgtatccat

SEQ ID NO: 6282 - DNA, 20 bp, synthetic construct
  source 1..20: mol_type = other DNA
caaatatttaccattggata

SEQ ID NO: 6283 - DNA, 20 bp, synthetic construct
  source 1..20: mol_type = other DNA
caaatggcactagtaaactg

SEQ ID NO: 6284 - DNA, 20 bp, synthetic construct
  source 1..20: mol_type = other DNA
caaattaacacccacccagg

SEQ ID NO: 6285 - DNA, 21 bp, synthetic construct
  source 1..21: mol_type = other DNA
caacacatagcgcctcatttt

SEQ ID NO: 6286 - DNA, 20 bp, synthetic construct
  source 1..20: mol_type = other DNA
caacataccttgatagtcca

SEQ ID NO: 6287 - DNA, 20 bp, synthetic construct
  source 1..20: mol_type = other DNA
caacattcggtgggcgttca

SEQ ID NO: 6288 - DNA, 21 bp, synthetic construct
  source 1..21: mol_type = other DNA
caacattcggtgggcgttcac

SEQ ID NO: 6289 - DNA, 20 bp, synthetic construct
  source 1..20: mol_type = other DNA
caaccaccagcacgggacca

SEQ ID NO: 6290 - DNA, 20 bp, synthetic construct
  source 1..20: mol_type = other DNA
caacctttcaccaaactctg

SEQ ID NO: 6291 - DNA, 20 bp, synthetic construct
  source 1..20: mol_type = other DNA
caacgaattgtgggtctttt

SEQ ID NO: 6292 - DNA, 20 bp, synthetic construct
  source 1..20: mol_type = other DNA
caacttgtcctggttatcgc

SEQ ID NO: 6293 - DNA, 20 bp, synthetic construct
  source 1..20: mol_type = other DNA
caagaaatgtgaaaccacaa

SEQ ID NO: 6294 - DNA, 20 bp, synthetic construct
  source 1..20: mol_type = other DNA
caagaagatgaggcatagca

SEQ ID NO: 6295 - DNA, 21 bp, synthetic construct
  source 1..21: mol_type = other DNA
caagaagatgaggcatagcag

SEQ ID NO: 6296 - DNA, 20 bp, synthetic construct
  source 1..20: mol_type = other DNA
caagaatatggtgacccaca

SEQ ID NO: 6297 - DNA, 20 bp, synthetic construct
  source 1..20: mol_type = other DNA
caagaatcctcacaataccg

SEQ ID NO: 6298 - DNA, 20 bp, synthetic construct
  source 1..20: mol_type = other DNA
caagacattatcaaaaaatg

SEQ ID NO: 6299 - DNA, 20 bp, synthetic construct
  source 1..20: mol_type = other DNA
caagagttgcctgaacttta

SEQ ID NO: 6300 - DNA, 20 bp, synthetic construct
  source 1..20: mol_type = other DNA
caagatctacagcatggggc

SEQ ID NO: 6301 - DNA, 20 bp, synthetic construct
  source 1..20: mol_type = other DNA
caagcaattctttgctgggg

SEQ ID NO: 6302 - DNA, 20 bp, synthetic construct
  source 1..20: mol_type = other DNA
caagcctccaagctgtgcct

SEQ ID NO: 6303 - DNA, 20 bp, synthetic construct
  source 1..20: mol_type = other DNA
caaggacccataacttccaa

SEQ ID NO: 6304 - DNA, 20 bp, synthetic construct
  source 1..20: mol_type = other DNA
caaggcacagcttggaggct

SEQ ID NO: 6305 - DNA, 20 bp, synthetic construct
  source 1..20: mol_type = other DNA
caagttggaggacaggaggt

SEQ ID NO: 6306 - DNA, 21 bp, synthetic construct
  source 1..21: mol_type = other DNA
caataccgcagagtctagact

SEQ ID NO: 6307 - DNA, 20 bp, synthetic construct
  source 1..20: mol_type = other DNA
caatcaataggcctgttaat

SEQ ID NO: 6308 - DNA, 21 bp, synthetic construct
  source 1..21: mol_type = other DNA
caatcaataggcctgttaata

SEQ ID NO: 6309 - DNA, 20 bp, synthetic construct
  source 1..20: mol_type = other DNA
caatcccaacaaggacacct

SEQ ID NO: 6310 - DNA, 20 bp, synthetic construct
  source 1..20: mol_type = other DNA
caatcgccagacaggaaggc

SEQ ID NO: 6311 - DNA, 20 bp, synthetic construct
  source 1..20: mol_type = other DNA
caatctggatttgctgtgtt

SEQ ID NO: 6312 - DNA, 20 bp, synthetic construct
  source 1..20: mol_type = other DNA
caatgctcaggagactctaa

SEQ ID NO: 6313 - DNA, 20 bp, synthetic construct
  source 1..20: mol_type = other DNA
caatgtcaacgaccgacctt

SEQ ID NO: 6314 - DNA, 20 bp, synthetic construct
  source 1..20: mol_type = other DNA
caattcgttgacatactttc

SEQ ID NO: 6315 - DNA, 20 bp, synthetic construct
  source 1..20: mol_type = other DNA
cacaacctttcaccaaactc

SEQ ID NO: 6316 - DNA, 20 bp, synthetic construct
  source 1..20: mol_type = other DNA
cacaagaacacatcatacaa

SEQ ID NO: 6317 - DNA, 20 bp, synthetic construct
  source 1..20: mol_type = other DNA
cacaagagttgcctgaactt

SEQ ID NO: 6318 - DNA, 20 bp, synthetic construct
  source 1..20: mol_type = other DNA
cacacggtagttccccctag

SEQ ID NO: 6319 - DNA, 20 bp, synthetic construct
  source 1..20: mol_type = other DNA
cacacggtccggcagatgag

SEQ ID NO: 6320 - DNA, 20 bp, synthetic construct
  source 1..20: mol_type = other DNA
cacagaaaggccttgtaagt

SEQ ID NO: 6321 - DNA, 20 bp, synthetic construct
  source 1..20: mol_type = other DNA
cacagacctggccgttgccg

SEQ ID NO: 6322 - DNA, 20 bp, synthetic construct
  source 1..20: mol_type = other DNA
cacagacggggagtccgcgt

SEQ ID NO: 6323 - DNA, 20 bp, synthetic construct
  source 1..20: mol_type = other DNA
cacatagcgcctcattttgt

SEQ ID NO: 6324 - DNA, 20 bp, synthetic construct
  source 1..20: mol_type = other DNA
cacatcatacaaaaaatcaa

SEQ ID NO: 6325 - DNA, 20 bp, synthetic construct
  source 1..20: mol_type = other DNA
cacatcatccatataactga

SEQ ID NO: 6326 - DNA, 20 bp, synthetic construct
  source 1..20: mol_type = other DNA
cacatttcttgtctcacttt

SEQ ID NO: 6327 - DNA, 20 bp, synthetic construct
  source 1..20: mol_type = other DNA
cacattttttgataatgtct

SEQ ID NO: 6328 - DNA, 20 bp, synthetic construct
  source 1..20: mol_type = other DNA
caccaaactctgcaagatcc

SEQ ID NO: 6329 - DNA, 20 bp, synthetic construct
  source 1..20: mol_type = other DNA
caccaatcgccagacaggaa

SEQ ID NO: 6330 - DNA, 20 bp, synthetic construct
  source 1..20: mol_type = other DNA
gaagaactccctcgcctcgc

SEQ ID NO: 6331 - DNA, 20 bp, synthetic construct
  source 1..20: mol_type = other DNA
caccagcacgggaccatgcc

SEQ ID NO: 6332 - DNA, 20 bp, synthetic construct
  source 1..20: mol_type = other DNA
caccagttggatccagcctt

SEQ ID NO: 6333 - DNA, 20 bp, synthetic construct
  source 1..20: mol_type = other DNA
caccatactgcactcaggca

SEQ ID NO: 6334 - DNA, 20 bp, synthetic construct
  source 1..20: mol_type = other DNA
cacccaaggcacagcttgga

SEQ ID NO: 6335 - DNA, 20 bp, synthetic construct
  source 1..20: mol_type = other DNA
caccccaaaaggcctccgtg

SEQ ID NO: 6336 - DNA, 20 bp, synthetic construct
  source 1..20: mol_type = other DNA
caccgcacggaggccttttg

SEQ ID NO: 6337 - DNA, 20 bp, synthetic construct
  source 1..20: mol_type = other DNA
cacctcaccatactgcactc

SEQ ID NO: 6338 - DNA, 20 bp, synthetic construct
  source 1..20: mol_type = other DNA
cacctctgcacgtcgcatgg

SEQ ID NO: 6339 - DNA, 20 bp, synthetic construct
  source 1..20: mol_type = other DNA
cacctggccagacgccaaca

SEQ ID NO: 6340 - DNA, 20 bp, synthetic construct
  source 1..20: mol_type = other DNA
cacggaggccttttggggtg

SEQ ID NO: 6341 - DNA, 20 bp, synthetic construct
  source 1..20: mol_type = other DNA
cacggtccggcagatgagaa

SEQ ID NO: 6342 - DNA, 20 bp, synthetic construct
  source 1..20: mol_type = other DNA
cactagtaaactgagccagg

SEQ ID NO: 6343 - DNA, 20 bp, synthetic construct
  source 1..20: mol_type = other DNA
cactatttacacactctatg

SEQ ID NO: 6344 - DNA, 20 bp, synthetic construct
  source 1..20: mol_type = other DNA
cactcaggcaagcaattctt

SEQ ID NO: 6345 - DNA, 20 bp, synthetic construct
  source 1..20: mol_type = other DNA
cactcccataggaattttcc

SEQ ID NO: 6346 - DNA, 20 bp, synthetic construct
  source 1..20: mol_type = other DNA
cactgaacaaatggcactag

SEQ ID NO: 6347 - DNA, 20 bp, synthetic construct
  source 1..20: mol_type = other DNA
cactggctggggcttggtca

SEQ ID NO: 6348 - DNA, 21 bp, synthetic construct
  source 1..21: mol_type = other DNA
cactgtttggctttcagttat

SEQ ID NO: 6349 - DNA, 20 bp, synthetic construct
  source 1..20: mol_type = other DNA
cacttacagttaatgagaaa

SEQ ID NO: 6350 - DNA, 21 bp, synthetic construct
  source 1..21: mol_type = other DNA
cacttacagttaatgagaaaa

SEQ ID NO: 6351 - DNA, 20 bp, synthetic construct
  source 1..20: mol_type = other DNA
cactttctcgccaacttaca

SEQ ID NO: 6352 - DNA, 20 bp, synthetic construct
  source 1..20: mol_type = other DNA
cagaagaaccaacaagaaga

SEQ ID NO: 6353 - DNA, 20 bp, synthetic construct
  source 1..20: mol_type = other DNA
cagacacatccagcgataac

SEQ ID NO: 6354 - DNA, 20 bp, synthetic construct
  source 1..20: mol_type = other DNA
cagacctgctgcgagcaaaa

SEQ ID NO: 6355 - DNA, 20 bp, synthetic construct
  source 1..20: mol_type = other DNA
cagacctggccgttgccggg

SEQ ID NO: 6356 - DNA, 20 bp, synthetic construct
  source 1..20: mol_type = other DNA
cagacgaaggtctcaatcgc

SEQ ID NO: 6357 - DNA, 20 bp, synthetic construct
  source 1..20: mol_type = other DNA
cagacggagaaggggacgag

SEQ ID NO: 6358 - DNA, 20 bp, synthetic construct
  source 1..20: mol_type = other DNA
cagacggggagtccgcgtaa

SEQ ID NO: 6359 - DNA, 20 bp, synthetic construct
  source 1..20: mol_type = other DNA
cagagcaaacacagcaaatc

SEQ ID NO: 6360 - DNA, 20 bp, synthetic construct
  source 1..20: mol_type = other DNA
cagagctgaggcggtatcta

SEQ ID NO: 6361 - DNA, 20 bp, synthetic construct
  source 1..20: mol_type = other DNA
cagagtttggtgaaaggttg

SEQ ID NO: 6362 - DNA, 20 bp, synthetic construct
  source 1..20: mol_type = other DNA
cagatgagaaggcacagacg

SEQ ID NO: 6363 - DNA, 20 bp, synthetic construct
  source 1..20: mol_type = other DNA
cagcaaagaattgcttgcct

SEQ ID NO: 6364 - DNA, 20 bp, synthetic construct
  source 1..20: mol_type = other DNA
cagcaacaggagggatacat

SEQ ID NO: 6365 - DNA, 20 bp, synthetic construct
  source 1..20: mol_type = other DNA
cagcacagcctagcagccat

SEQ ID NO: 6366 - DNA, 20 bp, synthetic construct
  source 1..20: mol_type = other DNA
cagcaggatgaagaggaaga

SEQ ID NO: 6367 - DNA, 20 bp, synthetic construct
  source 1..20: mol_type = other DNA
cagcatggggcagaatcttt

SEQ ID NO: 6368 - DNA, 20 bp, synthetic construct
  source 1..20: mol_type = other DNA
cagccagtgggggttgcgtc

SEQ ID NO: 6369 - DNA, 20 bp, synthetic construct
  source 1..20: mol_type = other DNA
cagcctagcagccatggata

SEQ ID NO: 6370 - DNA, 21 bp, synthetic construct
  source 1..21: mol_type = other DNA
cagcctcctagtacaaagacc

SEQ ID NO: 6371 - DNA, 20 bp, synthetic construct
  source 1..20: mol_type = other DNA
cagcgataaccaggacaagt

SEQ ID NO: 6372 - DNA, 20 bp, synthetic construct
  source 1..20: mol_type = other DNA
cagcgccgacgggacgtaaa

SEQ ID NO: 6373 - DNA, 20 bp, synthetic construct
  source 1..20: mol_type = other DNA
cagcggtaaaaagggactca

SEQ ID NO: 6374 - DNA, 21 bp, synthetic construct
  source 1..21: mol_type = other DNA
cagctctgtatcgggaagcct

SEQ ID NO: 6375 - DNA, 20 bp, synthetic construct
  source 1..20: mol_type = other DNA
cagcttggaggcttgaacag

SEQ ID NO: 6376 - DNA, 20 bp, synthetic construct
  source 1..20: mol_type = other DNA
caggacaagttggaggacag

SEQ ID NO: 6377 - DNA, 20 bp, synthetic construct
  source 1..20: mol_type = other DNA
caggagactctaaggcttcc

SEQ ID NO: 6378 - DNA, 20 bp, synthetic construct
  source 1..20: mol_type = other DNA
caggaggcggatttgctggc

SEQ ID NO: 6379 - DNA, 20 bp, synthetic construct
  source 1..20: mol_type = other DNA
caggaggttggtgagtgatt

SEQ ID NO: 6380 - DNA, 20 bp, synthetic construct
  source 1..20: mol_type = other DNA
caggatccagttggcagcac

SEQ ID NO: 6381 - DNA, 20 bp, synthetic construct
  source 1..20: mol_type = other DNA
caggatgaagaggaagatga

SEQ ID NO: 6382 - DNA, 20 bp, synthetic construct
  source 1..20: mol_type = other DNA
caggcaagcaattctttgct

SEQ ID NO: 6383 - DNA, 20 bp, synthetic construct
  source 1..20: mol_type = other DNA
cagggtccccaatcctcgag

SEQ ID NO: 6384 - DNA, 20 bp, synthetic construct
  source 1..20: mol_type = other DNA
caggtacagtagaagaataa

SEQ ID NO: 6385 - DNA, 20 bp, synthetic construct
  source 1..20: mol_type = other DNA
caggtattgtttacacagaa

SEQ ID NO: 6386 - DNA, 20 bp, synthetic construct
  source 1..20: mol_type = other DNA
caggtgcaatttccgtccga

SEQ ID NO: 6387 - DNA, 20 bp, synthetic construct
  source 1..20: mol_type = other DNA
caggtgtccttgttgggatt

SEQ ID NO: 6388 - DNA, 20 bp, synthetic construct
  source 1..20: mol_type = other DNA
cagtaaagttccccacctta

SEQ ID NO: 6389 - DNA, 21 bp, synthetic construct
  source 1..21: mol_type = other DNA
cagtagaagaataaagaccag

SEQ ID NO: 6390 - DNA, 20 bp, synthetic construct
  source 1..20: mol_type = other DNA
cagtagctccaaattcttta

SEQ ID NO: 6391 - DNA, 21 bp, synthetic construct
  source 1..21: mol_type = other DNA
cagtagctccaaattctttat

SEQ ID NO: 6392 - DNA, 20 bp, synthetic construct
  source 1..20: mol_type = other DNA
cagtatggtgaggtgaacaa

SEQ ID NO: 6393 - DNA, 20 bp, synthetic construct
  source 1..20: mol_type = other DNA
cagtctttgaagtatgcctc

SEQ ID NO: 6394 - DNA, 21 bp, synthetic construct
  source 1..21: mol_type = other DNA
cagttaatgagaaaagaagat

SEQ ID NO: 6395 - DNA, 20 bp, synthetic construct
  source 1..20: mol_type = other DNA
cagttatgtcaacactaata

SEQ ID NO: 6396 - DNA, 20 bp, synthetic construct
  source 1..20: mol_type = other DNA
cagttggatccagccttcag

SEQ ID NO: 6397 - DNA, 20 bp, synthetic construct
  source 1..20: mol_type = other DNA
cagttggcagcacagcctag

SEQ ID NO: 6398 - DNA, 21 bp, synthetic construct
  source 1..21: mol_type = other DNA
cagtttgtaggcccacttaca

SEQ ID NO: 6399 - DNA, 20 bp, synthetic construct
  source 1..20: mol_type = other DNA
cataaattggtctgcgcacc

SEQ ID NO: 6400 - DNA, 20 bp, synthetic construct
  source 1..20: mol_type = other DNA
cataacccataaaattcaga

SEQ ID NO: 6401 - DNA, 20 bp, synthetic construct
  source 1..20: mol_type = other DNA
cataaggtggggaactttac

SEQ ID NO: 6402 - DNA, 20 bp, synthetic construct
  source 1..20: mol_type = other DNA
catacaagggcattaacgca

SEQ ID NO: 6403 - DNA, 20 bp, synthetic construct
  source 1..20: mol_type = other DNA
cataccttgatagtccagaa

SEQ ID NO: 6404 - DNA, 20 bp, synthetic construct
  source 1..20: mol_type = other DNA
catactacaaactttgccag

SEQ ID NO: 6405 - DNA, 20 bp, synthetic construct
  source 1..20: mol_type = other DNA
catactgcggaactcctagc

SEQ ID NO: 6406 - DNA, 20 bp, synthetic construct
  source 1..20: mol_type = other DNA
catagaggttccttgagcag

SEQ ID NO: 6407 - DNA, 20 bp, synthetic construct
  source 1..20: mol_type = other DNA
catagcagcaggatgaagag

SEQ ID NO: 6408 - DNA, 20 bp, synthetic construct
  source 1..20: mol_type = other DNA
cataggaattttccgaaagc

SEQ ID NO: 6409 - DNA, 21 bp, synthetic construct
  source 1..21: mol_type = other DNA
cataggaattttccgaaagcc

SEQ ID NO: 6410 - DNA, 20 bp, synthetic construct
  source 1..20: mol_type = other DNA
catattagtgttgacataac

SEQ ID NO: 6411 - DNA, 20 bp, synthetic construct
  source 1..20: mol_type = other DNA
catcatcctgggctttcgga

SEQ ID NO: 6412 - DNA, 20 bp, synthetic construct
  source 1..20: mol_type = other DNA
catccagcgataaccaggac

SEQ ID NO: 6413 - DNA, 20 bp, synthetic construct
  source 1..20: mol_type = other DNA
catccatataactgaaagcc

SEQ ID NO: 6414 - DNA, 21 bp, synthetic construct
  source 1..21: mol_type = other DNA
catccatataactgaaagcca

SEQ ID NO: 6415 - DNA, 20 bp, synthetic construct
  source 1..20: mol_type = other DNA
catcgtatccatggctgcta

SEQ ID NO: 6416 - DNA, 20 bp, synthetic construct
  source 1..20: mol_type = other DNA
catcttcctcttcatcctgc

SEQ ID NO: 6417 - DNA, 20 bp, synthetic construct
  source 1..20: mol_type = other DNA
catcttcttgttggttcttc

SEQ ID NO: 6418 - DNA, 20 bp, synthetic construct
  source 1..20: mol_type = other DNA
catcttgagtccctttttac

SEQ ID NO: 6419 - DNA, 20 bp, synthetic construct
  source 1..20: mol_type = other DNA
catgaccaagccccagccag

SEQ ID NO: 6420 - DNA, 21 bp, synthetic construct
  source 1..21: mol_type = other DNA
catgaccaagccccagccagt

SEQ ID NO: 6421 - DNA, 21 bp, synthetic construct
  source 1..21: mol_type = other DNA
catgcaactttttcacctctg

SEQ ID NO: 6422 - DNA, 20 bp, synthetic construct
  source 1..20: mol_type = other DNA
catgcatacaagggcattaa

SEQ ID NO: 6423 - DNA, 20 bp, synthetic construct
  source 1..20: mol_type = other DNA
catgccccaaagccacccaa

SEQ ID NO: 6424 - DNA, 20 bp, synthetic construct
  source 1..20: mol_type = other DNA
catgcgacgtgcagaggtga

SEQ ID NO: 6425 - DNA, 20 bp, synthetic construct
  source 1..20: mol_type = other DNA
catgctgtagatcttgttcc

SEQ ID NO: 6426 - DNA, 21 bp, synthetic construct
  source 1..21: mol_type = other DNA
catgctgtagatcttgttccc

SEQ ID NO: 6427 - DNA, 20 bp, synthetic construct
  source 1..20: mol_type = other DNA
catggacatcgacccttata

SEQ ID NO: 6428 - DNA, 20 bp, synthetic construct
  source 1..20: mol_type = other DNA
catggtcccgtgctggtggt

SEQ ID NO: 6429 - DNA, 21 bp, synthetic construct
  source 1..21: mol_type = other DNA
catggtcccgtgctggtggtt

SEQ ID NO: 6430 - DNA, 20 bp, synthetic construct
  source 1..20: mol_type = other DNA
catggtgctggtgcgcagac

SEQ ID NO: 6431 - DNA, 20 bp, synthetic construct
  source 1..20: mol_type = other DNA
catgttcagcgcagggtccc

SEQ ID NO: 6432 - DNA, 20 bp, synthetic construct
  source 1..20: mol_type = other DNA
cattagttccccccagcaaa

SEQ ID NO: 6433 - DNA, 20 bp, synthetic construct
  source 1..20: mol_type = other DNA
cattcggtgggcgttcacgg

SEQ ID NO: 6434 - DNA, 20 bp, synthetic construct
  source 1..20: mol_type = other DNA
cattgaggttcccgagattg

SEQ ID NO: 6435 - DNA, 21 bp, synthetic construct
  source 1..21: mol_type = other DNA
cattggaaaacaccatctttt

SEQ ID NO: 6436 - DNA, 20 bp, synthetic construct
  source 1..20: mol_type = other DNA
cattggaagttatgggtcct

SEQ ID NO: 6437 - DNA, 20 bp, synthetic construct
  source 1..20: mol_type = other DNA
cattgtgtaaatggggcagc

SEQ ID NO: 6438 - DNA, 20 bp, synthetic construct
  source 1..20: mol_type = other DNA
cattgttcacctcaccatac

SEQ ID NO: 6439 - DNA, 20 bp, synthetic construct
  source 1..20: mol_type = other DNA
catttaaaccctaacaaaac

SEQ ID NO: 6440 - DNA, 20 bp, synthetic construct
  source 1..20: mol_type = other DNA
catttacaccaagacattat

SEQ ID NO: 6441 - DNA, 20 bp, synthetic construct
  source 1..20: mol_type = other DNA
catttcttgtctcacttttg

SEQ ID NO: 6442 - DNA, 20 bp, synthetic construct
  source 1..20: mol_type = other DNA
catttggtggtctataagct

SEQ ID NO: 6443 - DNA, 20 bp, synthetic construct
  source 1..20: mol_type = other DNA
catttgttcagtggttcgta

SEQ ID NO: 6444 - DNA, 20 bp, synthetic construct
  source 1..20: mol_type = other DNA
ccaaaagacccacaattcgt

SEQ ID NO: 6445 - DNA, 20 bp, synthetic construct
  source 1..20: mol_type = other DNA
ccaaaaggcctccgtgcggt

SEQ ID NO: 6446 - DNA, 20 bp, synthetic construct
  source 1..20: mol_type = other DNA
ccaaaccttcggacggaaat

SEQ ID NO: 6447 - DNA, 20 bp, synthetic construct
  source 1..20: mol_type = other DNA
ccaaactctgcaagatccca

SEQ ID NO: 6448 - DNA, 20 bp, synthetic construct
  source 1..20: mol_type = other DNA
ccaaatatttaccattggat

SEQ ID NO: 6449 - DNA, 20 bp, synthetic construct
  source 1..20: mol_type = other DNA
ccaacaagaagatgaggcat

SEQ ID NO: 6450 - DNA, 20 bp, synthetic construct
  source 1..20: mol_type = other DNA
ccaagaatatggtgacccac

SEQ ID NO: 6451 - DNA, 20 bp, synthetic construct
  source 1..20: mol_type = other DNA
ccaagtctgtacagcatctt

SEQ ID NO: 6452 - DNA, 20 bp, synthetic construct
  source 1..20: mol_type = other DNA
ccaataccacatcatccata

SEQ ID NO: 6453 - DNA, 20 bp, synthetic construct
  source 1..20: mol_type = other DNA
ccaatcaataggcctgttaa

SEQ ID NO: 6454 - DNA, 20 bp, synthetic construct
  source 1..20: mol_type = other DNA
ccaatcctcgagaagattga

SEQ ID NO: 6455 - DNA, 20 bp, synthetic construct
  source 1..20: mol_type = other DNA
ccaatcgccagacaggaagg

SEQ ID NO: 6456 - DNA, 21 bp, synthetic construct
  source 1..21: mol_type = other DNA
ccaatgaggattaaagacagg

SEQ ID NO: 6457 - DNA, 20 bp, synthetic construct
  source 1..20: mol_type = other DNA
ccacaagaacacatcataca

SEQ ID NO: 6458 - DNA, 21 bp, synthetic construct
  source 1..21: mol_type = other DNA
ccacaattcgttgacatactt

SEQ ID NO: 6459 - DNA, 20 bp, synthetic construct
  source 1..20: mol_type = other DNA
ccacatcatccatataactg

SEQ ID NO: 6460 - DNA, 20 bp, synthetic construct
  source 1..20: mol_type = other DNA
ccacattgtgtaaatggggc

SEQ ID NO: 6461 - DNA, 20 bp, synthetic construct
  source 1..20: mol_type = other DNA
ccaccaatcgccagacagga

SEQ ID NO: 6462 - DNA, 20 bp, synthetic construct
  source 1..20: mol_type = other DNA
ccaccagcacgggaccatgc

SEQ ID NO: 6463 - DNA, 20 bp, synthetic construct
  source 1..20: mol_type = other DNA
ccacccaaggcacagcttgg

SEQ ID NO: 6464 - DNA, 20 bp, synthetic construct
  source 1..20: mol_type = other DNA
ccaccgcacggaggcctttt

SEQ ID NO: 6465 - DNA, 20 bp, synthetic construct
  source 1..20: mol_type = other DNA
ccactcccataggaattttc

SEQ ID NO: 6466 - DNA, 20 bp, synthetic construct
  source 1..20: mol_type = other DNA
ccactgcatggcctgaggat

SEQ ID NO: 6467 - DNA, 20 bp, synthetic construct
  source 1..20: mol_type = other DNA
ccacttacagttaatgagaa

SEQ ID NO: 6468 - DNA, 20 bp, synthetic construct
  source 1..20: mol_type = other DNA
ccagacgccaacaaggtagg

SEQ ID NO: 6469 - DNA, 20 bp, synthetic construct
  source 1..20: mol_type = other DNA
ccagaggattgctggtggaa

SEQ ID NO: 6470 - DNA, 20 bp, synthetic construct
  source 1..20: mol_type = other DNA
ccagattgggacttcaatcc

SEQ ID NO: 6471 - DNA, 20 bp, synthetic construct
  source 1..20: mol_type = other DNA
ccagcaaagaattgcttgcc

SEQ ID NO: 6472 - DNA, 21 bp, synthetic construct
  source 1..21: mol_type = other DNA
ccagcatctagagacctagta

SEQ ID NO: 6473 - DNA, 20 bp, synthetic construct
  source 1..20: mol_type = other DNA
ccagccagtgggggttgcgt

SEQ ID NO: 6474 - DNA, 20 bp, synthetic construct
  source 1..20: mol_type = other DNA
ccagccttcagagcaaacac

SEQ ID NO: 6475 - DNA, 21 bp, synthetic construct
  source 1..21: mol_type = other DNA
ccagccttcagagcaaacaca

SEQ ID NO: 6476 - DNA, 20 bp, synthetic construct
  source 1..20: mol_type = other DNA
ccagcttatagaccaccaaa

SEQ ID NO: 6477 - DNA, 20 bp, synthetic construct
  source 1..20: mol_type = other DNA
ccaggacaagttggaggaca

SEQ ID NO: 6478 - DNA, 21 bp, synthetic construct
  source 1..21: mol_type = other DNA
ccaggatgatgggatgggaat

SEQ ID NO: 6479 - DNA, 20 bp, synthetic construct
  source 1..20: mol_type = other DNA
ccaggtctgtgccaagtgtt

SEQ ID NO: 6480 - DNA, 20 bp, synthetic construct
  source 1..20: mol_type = other DNA
ccaggtgtccttgttgggat

SEQ ID NO: 6481 - DNA, 20 bp, synthetic construct
  source 1..20: mol_type = other DNA
ccagtgggggttgcgtcagc

SEQ ID NO: 6482 - DNA, 20 bp, synthetic construct
  source 1..20: mol_type = other DNA
ccagttggatccagccttca

SEQ ID NO: 6483 - DNA, 20 bp, synthetic construct
  source 1..20: mol_type = other DNA
ccatactgcactcaggcaag

SEQ ID NO: 6484 - DNA, 21 bp, synthetic construct
  source 1..21: mol_type = other DNA
ccatagagtgtgtaaatagtg

SEQ ID NO: 6485 - DNA, 20 bp, synthetic construct
  source 1..20: mol_type = other DNA
ccatataactgaaagccaaa

SEQ ID NO: 6486 - DNA, 20 bp, synthetic construct
  source 1..20: mol_type = other DNA
ccatcatcctgggctttcgg

SEQ ID NO: 6487 - DNA, 20 bp, synthetic construct
  source 1..20: mol_type = other DNA
ccatgcaactttttcacctc

SEQ ID NO: 6488 - DNA, 20 bp, synthetic construct
  source 1..20: mol_type = other DNA
ccatgccccaaagccaccca

SEQ ID NO: 6489 - DNA, 20 bp, synthetic construct
  source 1..20: mol_type = other DNA
ccatgcgacgtgcagaggtg

SEQ ID NO: 6490 - DNA, 20 bp, synthetic construct
  source 1..20: mol_type = other DNA
ccatggatacgatgtatatt

SEQ ID NO: 6491 - DNA, 20 bp, synthetic construct
  source 1..20: mol_type = other DNA
ccatggctgctaggctgtgc

SEQ ID NO: 6492 - DNA, 20 bp, synthetic construct
  source 1..20: mol_type = other DNA
ccatttgttcagtggttcgt

SEQ ID NO: 6493 - DNA, 20 bp, synthetic construct
  source 1..20: mol_type = other DNA
cccaaaaggcctccgtgcgg

SEQ ID NO: 6494 - DNA, 20 bp, synthetic construct
  source 1..20: mol_type = other DNA
cccaaagccacccaaggcac

SEQ ID NO: 6495 - DNA, 20 bp, synthetic construct
  source 1..20: mol_type = other DNA
cccaacaaggacacctggcc

SEQ ID NO: 6496 - DNA, 20 bp, synthetic construct
  source 1..20: mol_type = other DNA
cccaacctccaatcactcac

SEQ ID NO: 6497 - DNA, 20 bp, synthetic construct
  source 1..20: mol_type = other DNA
cccaactcctcccagtcttt

SEQ ID NO: 6498 - DNA, 20 bp, synthetic construct
  source 1..20: mol_type = other DNA
cccaagaatatggtgaccca

SEQ ID NO: 6499 - DNA, 21 bp, synthetic construct
  source 1..21: mol_type = other DNA
cccacccaggtagctagagtc

SEQ ID NO: 6500 - DNA, 20 bp, synthetic construct
  source 1..20: mol_type = other DNA
cccaccgcacggaggccttt

SEQ ID NO: 6501 - DNA, 20 bp, synthetic construct
  source 1..20: mol_type = other DNA
cccacttacagttaatgaga

SEQ ID NO: 6502 - DNA, 20 bp, synthetic construct
  source 1..20: mol_type = other DNA
cccagaggattgctggtgga

SEQ ID NO: 6503 - DNA, 20 bp, synthetic construct
  source 1..20: mol_type = other DNA
cccatcatcctgggctttcg

SEQ ID NO: 6504 - DNA, 20 bp, synthetic construct
  source 1..20: mol_type = other DNA
cccatctctttgttttgtta

SEQ ID NO: 6505 - DNA, 21 bp, synthetic construct
  source 1..21: mol_type = other DNA
ccccaaaaggcctccgtgcgg

SEQ ID NO: 6506 - DNA, 20 bp, synthetic construct
  source 1..20: mol_type = other DNA
ccccaaagccacccaaggca

SEQ ID NO: 6507 - DNA, 20 bp, synthetic construct
  source 1..20: mol_type = other DNA
ccccaactcctcccagtctt

SEQ ID NO: 6508 - DNA, 21 bp, synthetic construct
  source 1..21: mol_type = other DNA
ccccaccgcacggaggccttt

SEQ ID NO: 6509 - DNA, 20 bp, synthetic construct
  source 1..20: mol_type = other DNA
ccccaccttatgagtccaag

SEQ ID NO: 6510 - DNA, 21 bp, synthetic construct
  source 1..21: mol_type = other DNA
ccccagcaaagaattgcttgc

SEQ ID NO: 6511 - DNA, 20 bp, synthetic construct
  source 1..20: mol_type = other DNA
ccccatctctttgttttgtt

SEQ ID NO: 6512 - DNA, 20 bp, synthetic construct
  source 1..20: mol_type = other DNA
ccccccagcaaagaattgct

SEQ ID NO: 6513 - DNA, 20 bp, synthetic construct
  source 1..20: mol_type = other DNA
ccccgagaagggtcgtccgc

SEQ ID NO: 6514 - DNA, 20 bp, synthetic construct
  source 1..20: mol_type = other DNA
ccccgcctgtaacacgagaa

SEQ ID NO: 6515 - DNA, 20 bp, synthetic construct
  source 1..20: mol_type = other DNA
ccccgctgtctccacctttg

SEQ ID NO: 6516 - DNA, 20 bp, synthetic construct
  source 1..20: mol_type = other DNA
ccccgttgcccggcaacggc

SEQ ID NO: 6517 - DNA, 20 bp, synthetic construct
  source 1..20: mol_type = other DNA
ccccttctcgtgttacaggc

SEQ ID NO: 6518 - DNA, 20 bp, synthetic construct
  source 1..20: mol_type = other DNA
cccgaccaccagttggatcc

SEQ ID NO: 6519 - DNA, 20 bp, synthetic construct
  source 1..20: mol_type = other DNA
cccgagaagggtcgtccgca

SEQ ID NO: 6520 - DNA, 20 bp, synthetic construct
  source 1..20: mol_type = other DNA
cccgagattgagatcttctg

SEQ ID NO: 6521 - DNA, 20 bp, synthetic construct
  source 1..20: mol_type = other DNA
cccgcctgtaacacgagaag

SEQ ID NO: 6522 - DNA, 20 bp, synthetic construct
  source 1..20: mol_type = other DNA
cccgccttccatagagtgtg

SEQ ID NO: 6523 - DNA, 20 bp, synthetic construct
  source 1..20: mol_type = other DNA
cccgcgcaggatccagttgg

SEQ ID NO: 6524 - DNA, 20 bp, synthetic construct
  source 1..20: mol_type = other DNA
cccgctgtctccacctttga

SEQ ID NO: 6525 - DNA, 20 bp, synthetic construct
  source 1..20: mol_type = other DNA
cccggcaacggccaggtctg

SEQ ID NO: 6526 - DNA, 20 bp, synthetic construct
  source 1..20: mol_type = other DNA
cccgtcggcgctgaatcctg

SEQ ID NO: 6527 - DNA, 20 bp, synthetic construct
  source 1..20: mol_type = other DNA
cccgtctgtgccttctcatc

SEQ ID NO: 6528 - DNA, 20 bp, synthetic construct
  source 1..20: mol_type = other DNA
cccgtggtcggtcggaacgg

SEQ ID NO: 6529 - DNA, 20 bp, synthetic construct
  source 1..20: mol_type = other DNA
cccgttgcccggcaacggcc

SEQ ID NO: 6530 - DNA, 20 bp, synthetic construct
  source 1..20: mol_type = other DNA
cccgtttgtcctctaattcc

SEQ ID NO: 6531 - DNA, 20 bp, synthetic construct
  source 1..20: mol_type = other DNA
ccctaacaaaacaaagagat

SEQ ID NO: 6532 - DNA, 20 bp, synthetic construct
  source 1..20: mol_type = other DNA
ccctagaagaagaactccct

SEQ ID NO: 6533 - DNA, 20 bp, synthetic construct
  source 1..20: mol_type = other DNA
ccctatcctatcaacacttc

SEQ ID NO: 6534 - DNA, 20 bp, synthetic construct
  source 1..20: mol_type = other DNA
ccctgctggtggctccagtt

SEQ ID NO: 6535 - DNA, 20 bp, synthetic construct
  source 1..20: mol_type = other DNA
cccttatcgtcaatcttctc

SEQ ID NO: 6536 - DNA, 20 bp, synthetic construct
  source 1..20: mol_type = other DNA
cccttctccgtctgccgttc

SEQ ID NO: 6537 - DNA, 20 bp, synthetic construct
  source 1..20: mol_type = other DNA
cccttctcgtgttacaggcg

SEQ ID NO: 6538 - DNA, 20 bp, synthetic construct
  source 1..20: mol_type = other DNA
ccgaaaaggttccacgcacg

SEQ ID NO: 6539 - DNA, 21 bp, synthetic construct
  source 1..21: mol_type = other DNA
ccgaaaaggttccacgcacgc

SEQ ID NO: 6540 - DNA, 20 bp, synthetic construct
  source 1..20: mol_type = other DNA
ccgaaggtttggtacagcaa

SEQ ID NO: 6541 - DNA, 20 bp, synthetic construct
  source 1..20: mol_type = other DNA
ccgaccttgaggcatacttc

SEQ ID NO: 6542 - DNA, 20 bp, synthetic construct
  source 1..20: mol_type = other DNA
ccgcaggattcagcgccgac

SEQ ID NO: 6543 - DNA, 20 bp, synthetic construct
  source 1..20: mol_type = other DNA
gacttctctcaattttctag

SEQ ID NO: 6544 - DNA, 20 bp, synthetic construct
  source 1..20: mol_type = other DNA
ccgcctcagctctgtatcgg

SEQ ID NO: 6545 - DNA, 20 bp, synthetic construct
  source 1..20: mol_type = other DNA
ccgccttccatagagtgtgt

SEQ ID NO: 6546 - DNA, 21 bp, synthetic construct
  source 1..21: mol_type = other DNA
ccgccttccatagagtgtgta

SEQ ID NO: 6547 - DNA, 20 bp, synthetic construct
  source 1..20: mol_type = other DNA
ccgcgcaggatccagttggc

SEQ ID NO: 6548 - DNA, 20 bp, synthetic construct
  source 1..20: mol_type = other DNA
ccgctgtctccacctttgag

SEQ ID NO: 6549 - DNA, 20 bp, synthetic construct
  source 1..20: mol_type = other DNA
ccgcttgttttgctcgcagc

SEQ ID NO: 6550 - DNA, 20 bp, synthetic construct
  source 1..20: mol_type = other DNA
ccggaagtgttgataggata

SEQ ID NO: 6551 - DNA, 21 bp, synthetic construct
  source 1..21: mol_type = other DNA
ccggcaacggccaggtctgtg

SEQ ID NO: 6552 - DNA, 20 bp, synthetic construct
  source 1..20: mol_type = other DNA
ccgtcggcgctgaatcctgc

SEQ ID NO: 6553 - DNA, 20 bp, synthetic construct
  source 1..20: mol_type = other DNA
ccgtgcggtggggtgaaacc

SEQ ID NO: 6554 - DNA, 20 bp, synthetic construct
  source 1..20: mol_type = other DNA
ccgtggtcggtcggaacggc

SEQ ID NO: 6555 - DNA, 21 bp, synthetic construct
  source 1..21: mol_type = other DNA
ccgtgtgtcttggccaaaatt

SEQ ID NO: 6556 - DNA, 20 bp, synthetic construct
  source 1..20: mol_type = other DNA
ccgttgccgggcaacggggt

SEQ ID NO: 6557 - DNA, 21 bp, synthetic construct
  source 1..21: mol_type = other DNA
ccgtttctcctggctcagttt

SEQ ID NO: 6558 - DNA, 20 bp, synthetic construct
  source 1..20: mol_type = other DNA
ccgtttgtcctctaattcca

SEQ ID NO: 6559 - DNA, 20 bp, synthetic construct
  source 1..20: mol_type = other DNA
cctaacaaaacaaagagatg

SEQ ID NO: 6560 - DNA, 20 bp, synthetic construct
  source 1..20: mol_type = other DNA
cctaatatacatttacacca

SEQ ID NO: 6561 - DNA, 20 bp, synthetic construct
  source 1..20: mol_type = other DNA
cctacagcctcctagtacaa

SEQ ID NO: 6562 - DNA, 20 bp, synthetic construct
  source 1..20: mol_type = other DNA
cctacgaaccactgaacaaa

SEQ ID NO: 6563 - DNA, 20 bp, synthetic construct
  source 1..20: mol_type = other DNA
cctagaaaattgagagaagt

SEQ ID NO: 6564 - DNA, 20 bp, synthetic construct
  source 1..20: mol_type = other DNA
cctatcctatcaacacttcc

SEQ ID NO: 6565 - DNA, 20 bp, synthetic construct
  source 1..20: mol_type = other DNA
cctcaatgttagtattcctt

SEQ ID NO: 6566 - DNA, 20 bp, synthetic construct
  source 1..20: mol_type = other DNA
cctcacaataccgcagagtc

SEQ ID NO: 6567 - DNA, 20 bp, synthetic construct
  source 1..20: mol_type = other DNA
cctccaagctgtgccttggg

SEQ ID NO: 6568 - DNA, 20 bp, synthetic construct
  source 1..20: mol_type = other DNA
cctccaccaatcgccagaca

SEQ ID NO: 6569 - DNA, 20 bp, synthetic construct
  source 1..20: mol_type = other DNA
cctccagcttatagaccacc

SEQ ID NO: 6570 - DNA, 20 bp, synthetic construct
  source 1..20: mol_type = other DNA
cctcccagtctttaaacaaa

SEQ ID NO: 6571 - DNA, 20 bp, synthetic construct
  source 1..20: mol_type = other DNA
cctcctagtacaaagacctt

SEQ ID NO: 6572 - DNA, 20 bp, synthetic construct
  source 1..20: mol_type = other DNA
cctcgagaagattgacgata

SEQ ID NO: 6573 - DNA, 21 bp, synthetic construct
  source 1..21: mol_type = other DNA
cctcgcctcgcagacgaaggt

SEQ ID NO: 6574 - DNA, 20 bp, synthetic construct
  source 1..20: mol_type = other DNA
cctctatgtatccctcctgt

SEQ ID NO: 6575 - DNA, 20 bp, synthetic construct
  source 1..20: mol_type = other DNA
cctctcactctgggatcttg

SEQ ID NO: 6576 - DNA, 20 bp, synthetic construct
  source 1..20: mol_type = other DNA
cctctgccgatccatactgc

SEQ ID NO: 6577 - DNA, 20 bp, synthetic construct
  source 1..20: mol_type = other DNA
cctctgggattctttcccga

SEQ ID NO: 6578 - DNA, 20 bp, synthetic construct
  source 1..20: mol_type = other DNA
cctgaactggagccaccagc

SEQ ID NO: 6579 - DNA, 20 bp, synthetic construct
  source 1..20: mol_type = other DNA
cctgaactttaggcccatat

SEQ ID NO: 6580 - DNA, 20 bp, synthetic construct
  source 1..20: mol_type = other DNA
cctgaggatgagtgtttctc

SEQ ID NO: 6581 - DNA, 20 bp, synthetic construct
  source 1..20: mol_type = other DNA
cctgagggctccaccccaaa

SEQ ID NO: 6582 - DNA, 20 bp, synthetic construct
  source 1..20: mol_type = other DNA
cctgcatgactactgctcaa

SEQ ID NO: 6583 - DNA, 20 bp, synthetic construct
  source 1..20: mol_type = other DNA
cctgcctcgtcgtctaacaa

SEQ ID NO: 6584 - DNA, 21 bp, synthetic construct
  source 1..21: mol_type = other DNA
cctgcctcgtcgtctaacaac

SEQ ID NO: 6585 - DNA, 20 bp, synthetic construct
  source 1..20: mol_type = other DNA
cctgcggacgacccttctcg

SEQ ID NO: 6586 - DNA, 20 bp, synthetic construct
  source 1..20: mol_type = other DNA
cctgcgttaatgcccttgta

SEQ ID NO: 6587 - DNA, 20 bp, synthetic construct
  source 1..20: mol_type = other DNA
cctgctgcgagcaaaacaag

SEQ ID NO: 6588 - DNA, 20 bp, synthetic construct
  source 1..20: mol_type = other DNA
cctgctggtggctccagttc

SEQ ID NO: 6589 - DNA, 20 bp, synthetic construct
  source 1..20: mol_type = other DNA
cctggaattagaggacaaac

SEQ ID NO: 6590 - DNA, 20 bp, synthetic construct
  source 1..20: mol_type = other DNA
cctggccagacgccaacaag

SEQ ID NO: 6591 - DNA, 20 bp, synthetic construct
  source 1..20: mol_type = other DNA
cctggccgttgccgggcaac

SEQ ID NO: 6592 - DNA, 20 bp, synthetic construct
  source 1..20: mol_type = other DNA
cctgggtgggtgttaatttg

SEQ ID NO: 6593 - DNA, 20 bp, synthetic construct
  source 1..20: mol_type = other DNA
cctgtctggcgattggtgga

SEQ ID NO: 6594 - DNA, 20 bp, synthetic construct
  source 1..20: mol_type = other DNA
cctgtctttaatcctcattg

SEQ ID NO: 6595 - DNA, 20 bp, synthetic construct
  source 1..20: mol_type = other DNA
cctgttaataggaagttttc

SEQ ID NO: 6596 - DNA, 20 bp, synthetic construct
  source 1..20: mol_type = other DNA
ccttatcgtcaatcttctcg

SEQ ID NO: 6597 - DNA, 21 bp, synthetic construct
  source 1..21: mol_type = other DNA
ccttattatccagaacatcta

SEQ ID NO: 6598 - DNA, 20 bp, synthetic construct
  source 1..20: mol_type = other DNA
ccttcagtacgagatcttct

SEQ ID NO: 6599 - DNA, 20 bp, synthetic construct
  source 1..20: mol_type = other DNA
ccttccatagagtgtgtaaa

SEQ ID NO: 6600 - DNA, 20 bp, synthetic construct
  source 1..20: mol_type = other DNA
ccttcctgtctggcgattgg

SEQ ID NO: 6601 - DNA, 20 bp, synthetic construct
  source 1..20: mol_type = other DNA
ccttcgtctgcgaggcgagg

SEQ ID NO: 6602 - DNA, 20 bp, synthetic construct
  source 1..20: mol_type = other DNA
ccttgatagtccagaagaac

SEQ ID NO: 6603 - DNA, 20 bp, synthetic construct
  source 1..20: mol_type = other DNA
ccttggactcataaggtggg

SEQ ID NO: 6604 - DNA, 20 bp, synthetic construct
  source 1..20: mol_type = other DNA
ccttgggtggctttggggca

SEQ ID NO: 6605 - DNA, 20 bp, synthetic construct
  source 1..20: mol_type = other DNA
ccttgttgggattgaagtcc

SEQ ID NO: 6606 - DNA, 20 bp, synthetic construct
  source 1..20: mol_type = other DNA
cctttggataaaacctagca

SEQ ID NO: 6607 - DNA, 20 bp, synthetic construct
  source 1..20: mol_type = other DNA
ccttttggggtggagccctc

SEQ ID NO: 6608 - DNA, 20 bp, synthetic construct
  source 1..20: mol_type = other DNA
cgaaggtttggtacagcaac

SEQ ID NO: 6609 - DNA, 20 bp, synthetic construct
  source 1..20: mol_type = other DNA
cgaagtgcacacggtccggc

SEQ ID NO: 6610 - DNA, 20 bp, synthetic construct
  source 1..20: mol_type = other DNA
cgaattttggccaagacaca

SEQ ID NO: 6611 - DNA, 21 bp, synthetic construct
  source 1..21: mol_type = other DNA
cgaattttggccaagacacac

SEQ ID NO: 6612 - DNA, 20 bp, synthetic construct
  source 1..20: mol_type = other DNA
cgaccccgagaagggtcgtc

SEQ ID NO: 6613 - DNA, 20 bp, synthetic construct
  source 1..20: mol_type = other DNA
cgacccttataaagaatttg

SEQ ID NO: 6614 - DNA, 20 bp, synthetic construct
  source 1..20: mol_type = other DNA
cgacccttctcggggtcgct

SEQ ID NO: 6615 - DNA, 20 bp, synthetic construct
  source 1..20: mol_type = other DNA
cgaccttgaggcatacttca

SEQ ID NO: 6616 - DNA, 20 bp, synthetic construct
  source 1..20: mol_type = other DNA
cgacgaggcaggtcccctag

SEQ ID NO: 6617 - DNA, 20 bp, synthetic construct
  source 1..20: mol_type = other DNA
cgacgtgcagaggtgaagcg

SEQ ID NO: 6618 - DNA, 20 bp, synthetic construct
  source 1..20: mol_type = other DNA
cgagaaagtgaaagcctgct

SEQ ID NO: 6619 - DNA, 20 bp, synthetic construct
  source 1..20: mol_type = other DNA
cgagaagattgacgataagg

SEQ ID NO: 6620 - DNA, 20 bp, synthetic construct
  source 1..20: mol_type = other DNA
cgagcaaaacaagcggctag

SEQ ID NO: 6621 - DNA, 20 bp, synthetic construct
  source 1..20: mol_type = other DNA
cgaggcaggtcccctagaag

SEQ ID NO: 6622 - DNA, 20 bp, synthetic construct
  source 1..20: mol_type = other DNA
cgagggagttcttcttctag

SEQ ID NO: 6623 - DNA, 20 bp, synthetic construct
  source 1..20: mol_type = other DNA
cgataaccaggacaagttgg

SEQ ID NO: 6624 - DNA, 20 bp, synthetic construct
  source 1..20: mol_type = other DNA
cgatgtatatttgcgggaga

SEQ ID NO: 6625 - DNA, 20 bp, synthetic construct
  source 1..20: mol_type = other DNA
cgattgagaccttcgtctgc

SEQ ID NO: 6626 - DNA, 20 bp, synthetic construct
  source 1..20: mol_type = other DNA
cgattggtggaggcaggagg

SEQ ID NO: 6627 - DNA, 21 bp, synthetic construct
  source 1..21: mol_type = other DNA
cgcaacccccactggctgggg

SEQ ID NO: 6628 - DNA, 20 bp, synthetic construct
  source 1..20: mol_type = other DNA
cgcacggaggccttttgggg

SEQ ID NO: 6629 - DNA, 20 bp, synthetic construct
  source 1..20: mol_type = other DNA
cgcagaagatctcaatctcg

SEQ ID NO: 6630 - DNA, 20 bp, synthetic construct
  source 1..20: mol_type = other DNA
cgcagaccaatttatgccta

SEQ ID NO: 6631 - DNA, 20 bp, synthetic construct
  source 1..20: mol_type = other DNA
cgcagagtctagactcgtgg

SEQ ID NO: 6632 - DNA, 20 bp, synthetic construct
  source 1..20: mol_type = other DNA
cgcaggataaccacattgtg

SEQ ID NO: 6633 - DNA, 20 bp, synthetic construct
  source 1..20: mol_type = other DNA
cgcaggattcagcgccgacg

SEQ ID NO: 6634 - DNA, 20 bp, synthetic construct
  source 1..20: mol_type = other DNA
cgcagggtccccaatcctcg

SEQ ID NO: 6635 - DNA, 21 bp, synthetic construct
  source 1..21: mol_type = other DNA
cgcagggtccccaatcctcga

SEQ ID NO: 6636 - DNA, 20 bp, synthetic construct
  source 1..20: mol_type = other DNA
cgcagtatggatcggcagag

SEQ ID NO: 6637 - DNA, 20 bp, synthetic construct
  source 1..20: mol_type = other DNA
cgcatggagaccaccgtgaa

SEQ ID NO: 6638 - DNA, 20 bp, synthetic construct
  source 1..20: mol_type = other DNA
cgccaacaaggtaggagctg

SEQ ID NO: 6639 - DNA, 20 bp, synthetic construct
  source 1..20: mol_type = other DNA
cgcccaccgaatgttgccca

SEQ ID NO: 6640 - DNA, 20 bp, synthetic construct
  source 1..20: mol_type = other DNA
cgccccgtggtcggtcggaa

SEQ ID NO: 6641 - DNA, 20 bp, synthetic construct
  source 1..20: mol_type = other DNA
cgccgacgggacgtaaacaa

SEQ ID NO: 6642 - DNA, 20 bp, synthetic construct
  source 1..20: mol_type = other DNA
cgccgcgtcgcagaagatct

SEQ ID NO: 6643 - DNA, 20 bp, synthetic construct
  source 1..20: mol_type = other DNA
cgcctcagctctgtatcggg

SEQ ID NO: 6644 - DNA, 20 bp, synthetic construct
  source 1..20: mol_type = other DNA
cgcctcctgcctccaccaat

SEQ ID NO: 6645 - DNA, 20 bp, synthetic construct
  source 1..20: mol_type = other DNA
cgcctcgcagacgaaggtct

SEQ ID NO: 6646 - DNA, 20 bp, synthetic construct
  source 1..20: mol_type = other DNA
cgcgctgatggcccatgacc

SEQ ID NO: 6647 - DNA, 21 bp, synthetic construct
  source 1..21: mol_type = other DNA
cgcgtaaagagaggtgcgccc

SEQ ID NO: 6648 - DNA, 20 bp, synthetic construct
  source 1..20: mol_type = other DNA
cgcgtgcgtggaaccttttc

SEQ ID NO: 6649 - DNA, 20 bp, synthetic construct
  source 1..20: mol_type = other DNA
cggaaaattcctatgggagt

SEQ ID NO: 6650 - DNA, 20 bp, synthetic construct
  source 1..20: mol_type = other DNA
cggaaactactgttgttaga

SEQ ID NO: 6651 - DNA, 20 bp, synthetic construct
  source 1..20: mol_type = other DNA
cggaacggcagacggagaag

SEQ ID NO: 6652 - DNA, 20 bp, synthetic construct
  source 1..20: mol_type = other DNA
cggaagtgttgataggatag

SEQ ID NO: 6653 - DNA, 20 bp, synthetic construct
  source 1..20: mol_type = other DNA
cggacgacccttctcggggt

SEQ ID NO: 6654 - DNA, 20 bp, synthetic construct
  source 1..20: mol_type = other DNA
cggcagacggagaaggggac

SEQ ID NO: 6655 - DNA, 20 bp, synthetic construct
  source 1..20: mol_type = other DNA
cggcgattgagaccttcgtc

SEQ ID NO: 6656 - DNA, 20 bp, synthetic construct
  source 1..20: mol_type = other DNA
cggctaggagttccgcagta

SEQ ID NO: 6657 - DNA, 20 bp, synthetic construct
  source 1..20: mol_type = other DNA
cgggaagccttagagtctcc

SEQ ID NO: 6658 - DNA, 20 bp, synthetic construct
  source 1..20: mol_type = other DNA
cgggcaacggggtaaaggtt

SEQ ID NO: 6659 - DNA, 20 bp, synthetic construct
  source 1..20: mol_type = other DNA
cgggctgaggcccactccca

SEQ ID NO: 6660 - DNA, 21 bp, synthetic construct
  source 1..21: mol_type = other DNA
cgggctgaggcccactcccat

SEQ ID NO: 6661 - DNA, 20 bp, synthetic construct
  source 1..20: mol_type = other DNA
cgggctgggtttcaccccac

SEQ ID NO: 6662 - DNA, 20 bp, synthetic construct
  source 1..20: mol_type = other DNA
cggggagtccgcgtaaagag

SEQ ID NO: 6663 - DNA, 20 bp, synthetic construct
  source 1..20: mol_type = other DNA
cggggtttttcttgttgaca

SEQ ID NO: 6664 - DNA, 20 bp, synthetic construct
  source 1..20: mol_type = other DNA
cgggtatattatataagaga

SEQ ID NO: 6665 - DNA, 20 bp, synthetic construct
  source 1..20: mol_type = other DNA
cggtaaaaagggactcaaga

SEQ ID NO: 6666 - DNA, 20 bp, synthetic construct
  source 1..20: mol_type = other DNA
cggtcggaacggcagacgga

SEQ ID NO: 6667 - DNA, 20 bp, synthetic construct
  source 1..20: mol_type = other DNA
cggtggggtgaaacccagcc

SEQ ID NO: 6668 - DNA, 20 bp, synthetic construct
  source 1..20: mol_type = other DNA
cggtttctcttccaaaagtg

SEQ ID NO: 6669 - DNA, 20 bp, synthetic construct
  source 1..20: mol_type = other DNA
cgtaaacaaaggacgtcccg

SEQ ID NO: 6670 - DNA, 20 bp, synthetic construct
  source 1..20: mol_type = other DNA
cgtactgaaggaaagaagtc

SEQ ID NO: 6671 - DNA, 20 bp, synthetic construct
  source 1..20: mol_type = other DNA
cgtcaatcttctcgaggatt

SEQ ID NO: 6672 - DNA, 20 bp, synthetic construct
  source 1..20: mol_type = other DNA
cgtcagcaaacacttggcac

SEQ ID NO: 6673 - DNA, 20 bp, synthetic construct
  source 1..20: mol_type = other DNA
cgtcccgcgcaggatccagt

SEQ ID NO: 6674 - DNA, 20 bp, synthetic construct
  source 1..20: mol_type = other DNA
cgtccgaaggtttggtacag

SEQ ID NO: 6675 - DNA, 20 bp, synthetic construct
  source 1..20: mol_type = other DNA
cgtcgcatggagaccaccgt

SEQ ID NO: 6676 - DNA, 20 bp, synthetic construct
  source 1..20: mol_type = other DNA
cgtctaacaacagtagtttc

SEQ ID NO: 6677 - DNA, 21 bp, synthetic construct
  source 1..21: mol_type = other DNA
cgtctaacaacagtagtttcc

SEQ ID NO: 6678 - DNA, 21 bp, synthetic construct
  source 1..21: mol_type = other DNA
cgtctggccaggtgtccttgt

SEQ ID NO: 6679 - DNA, 20 bp, synthetic construct
  source 1..20: mol_type = other DNA
cgtgaacgcccaccgaatgt

SEQ ID NO: 6680 - DNA, 20 bp, synthetic construct
  source 1..20: mol_type = other DNA
cgtgcagaggtgaagcgaag

SEQ ID NO: 6681 - DNA, 20 bp, synthetic construct
  source 1..20: mol_type = other DNA
cgtgcggtggggtgaaaccc

SEQ ID NO: 6682 - DNA, 21 bp, synthetic construct
  source 1..21: mol_type = other DNA
cgtgctggtggttgaggatcc

SEQ ID NO: 6683 - DNA, 20 bp, synthetic construct
  source 1..20: mol_type = other DNA
cgtgtgtcttggccaaaatt

SEQ ID NO: 6684 - DNA, 20 bp, synthetic construct
  source 1..20: mol_type = other DNA
cgttcacggtggtctccatg

SEQ ID NO: 6685 - DNA, 20 bp, synthetic construct
  source 1..20: mol_type = other DNA
cgttccgaccgaccacgggg

SEQ ID NO: 6686 - DNA, 20 bp, synthetic construct
  source 1..20: mol_type = other DNA
cgttgacattgcagagagtc

SEQ ID NO: 6687 - DNA, 21 bp, synthetic construct
  source 1..21: mol_type = other DNA
cgttgacattgcagagagtcc

SEQ ID NO: 6688 - DNA, 20 bp, synthetic construct
  source 1..20: mol_type = other DNA
cgttgccgggcaacggggta

SEQ ID NO: 6689 - DNA, 20 bp, synthetic construct
  source 1..20: mol_type = other DNA
ctaacaacagtagtttccgg

SEQ ID NO: 6690 - DNA, 20 bp, synthetic construct
  source 1..20: mol_type = other DNA
ctaatatgggcctaaagttc

SEQ ID NO: 6691 - DNA, 21 bp, synthetic construct
  source 1..21: mol_type = other DNA
ctaatgactctagctacctgg

SEQ ID NO: 6692 - DNA, 20 bp, synthetic construct
  source 1..20: mol_type = other DNA
ctaccttgttggcgtctggc

SEQ ID NO: 6693 - DNA, 20 bp, synthetic construct
  source 1..20: mol_type = other DNA
ctacgaaccactgaacaaat

SEQ ID NO: 6694 - DNA, 20 bp, synthetic construct
  source 1..20: mol_type = other DNA
ctactaggtctctagatgct

SEQ ID NO: 6695 - DNA, 20 bp, synthetic construct
  source 1..20: mol_type = other DNA
ctactgttgttagacgacga

SEQ ID NO: 6696 - DNA, 21 bp, synthetic construct
  source 1..21: mol_type = other DNA
ctactgttgttagacgacgag

SEQ ID NO: 6697 - DNA, 20 bp, synthetic construct
  source 1..20: mol_type = other DNA
ctagaagatctcgtactgaa

SEQ ID NO: 6698 - DNA, 21 bp, synthetic construct
  source 1..21: mol_type = other DNA
gctgctatgcctcatcttctt

SEQ ID NO: 6699 - DNA, 20 bp, synthetic construct
  source 1..20: mol_type = other DNA
ctagactctgcggtattgtg

SEQ ID NO: 6700 - DNA, 20 bp, synthetic construct
  source 1..20: mol_type = other DNA
ctagagtcattagttccccc

SEQ ID NO: 6701 - DNA, 20 bp, synthetic construct
  source 1..20: mol_type = other DNA
ctagcaggcataatcaattg

SEQ ID NO: 6702 - DNA, 20 bp, synthetic construct
  source 1..20: mol_type = other DNA
ctagccgcttgttttgctcg

SEQ ID NO: 6703 - DNA, 20 bp, synthetic construct
  source 1..20: mol_type = other DNA
ctagctacctgggtgggtgt

SEQ ID NO: 6704 - DNA, 21 bp, synthetic construct
  source 1..21: mol_type = other DNA
ctaggttttatccaaaggtta

SEQ ID NO: 6705 - DNA, 20 bp, synthetic construct
  source 1..20: mol_type = other DNA
ctagtaaactgagccaggag

SEQ ID NO: 6706 - DNA, 21 bp, synthetic construct
  source 1..21: mol_type = other DNA
ctagtagtcagttatgtcaac

SEQ ID NO: 6707 - DNA, 20 bp, synthetic construct
  source 1..20: mol_type = other DNA
ctataacggtttctcttcca

SEQ ID NO: 6708 - DNA, 20 bp, synthetic construct
  source 1..20: mol_type = other DNA
ctatcctatcaacacttccg

SEQ ID NO: 6709 - DNA, 21 bp, synthetic construct
  source 1..21: mol_type = other DNA
ctatgtgttgtttctctctta

SEQ ID NO: 6710 - DNA, 20 bp, synthetic construct
  source 1..20: mol_type = other DNA
ctattaacaggcctattgat

SEQ ID NO: 6711 - DNA, 20 bp, synthetic construct
  source 1..20: mol_type = other DNA
ctattgattggaaagtatgt

SEQ ID NO: 6712 - DNA, 20 bp, synthetic construct
  source 1..20: mol_type = other DNA
ctatttacacactctatgga

SEQ ID NO: 6713 - DNA, 20 bp, synthetic construct
  source 1..20: mol_type = other DNA
ctcaagatgctgtacagact

SEQ ID NO: 6714 - DNA, 20 bp, synthetic construct
  source 1..20: mol_type = other DNA
ctcaatcgccgcgtcgcaga

SEQ ID NO: 6715 - DNA, 21 bp, synthetic construct
  source 1..21: mol_type = other DNA
ctcaatctcgggaacctcaat

SEQ ID NO: 6716 - DNA, 20 bp, synthetic construct
  source 1..20: mol_type = other DNA
ctcacaataccgcagagtct

SEQ ID NO: 6717 - DNA, 20 bp, synthetic construct
  source 1..20: mol_type = other DNA
ctcaccaacctcctgtcctc

SEQ ID NO: 6718 - DNA, 20 bp, synthetic construct
  source 1..20: mol_type = other DNA
ctcaccatactgcactcagg

SEQ ID NO: 6719 - DNA, 20 bp, synthetic construct
  source 1..20: mol_type = other DNA
ctcaggctcagggcatacta

SEQ ID NO: 6720 - DNA, 20 bp, synthetic construct
  source 1..20: mol_type = other DNA
ctcatcctcaggccatgcag

SEQ ID NO: 6721 - DNA, 20 bp, synthetic construct
  source 1..20: mol_type = other DNA
ctccaacttgtcctggttat

SEQ ID NO: 6722 - DNA, 20 bp, synthetic construct
  source 1..20: mol_type = other DNA
ctccaagctgtgccttgggt

SEQ ID NO: 6723 - DNA, 20 bp, synthetic construct
  source 1..20: mol_type = other DNA
ctccaccaatcgccagacag

SEQ ID NO: 6724 - DNA, 21 bp, synthetic construct
  source 1..21: mol_type = other DNA
ctccaccccaaaaggcctccg

SEQ ID NO: 6725 - DNA, 20 bp, synthetic construct
  source 1..20: mol_type = other DNA
ctccagacctgctgcgagca

SEQ ID NO: 6726 - DNA, 20 bp, synthetic construct
  source 1..20: mol_type = other DNA
ctccatgcgacgtgcagagg

SEQ ID NO: 6727 - DNA, 21 bp, synthetic construct
  source 1..21: mol_type = other DNA
ctccatgttcagcgcagggtc

SEQ ID NO: 6728 - DNA, 20 bp, synthetic construct
  source 1..20: mol_type = other DNA
ctcccataggaattttccga

SEQ ID NO: 6729 - DNA, 20 bp, synthetic construct
  source 1..20: mol_type = other DNA
ctccctcgcctcgcagacga

SEQ ID NO: 6730 - DNA, 20 bp, synthetic construct
  source 1..20: mol_type = other DNA
ctcctaccttgttggcgtct

SEQ ID NO: 6731 - DNA, 20 bp, synthetic construct
  source 1..20: mol_type = other DNA
ctcctgcctccaccaatcgc

SEQ ID NO: 6732 - DNA, 20 bp, synthetic construct
  source 1..20: mol_type = other DNA
ctcctggctcagtttactag

SEQ ID NO: 6733 - DNA, 20 bp, synthetic construct
  source 1..20: mol_type = other DNA
ctcgagaagattgacgataa

SEQ ID NO: 6734 - DNA, 20 bp, synthetic construct
  source 1..20: mol_type = other DNA
ctcgaggattggggaccctg

SEQ ID NO: 6735 - DNA, 20 bp, synthetic construct
  source 1..20: mol_type = other DNA
ctctaaggcttcccgataca

SEQ ID NO: 6736 - DNA, 20 bp, synthetic construct
  source 1..20: mol_type = other DNA
ctctagatgctggatcttcc

SEQ ID NO: 6737 - DNA, 20 bp, synthetic construct
  source 1..20: mol_type = other DNA
ctctataacggtttctcttc

SEQ ID NO: 6738 - DNA, 21 bp, synthetic construct
  source 1..21: mol_type = other DNA
ctctataacggtttctcttcc

SEQ ID NO: 6739 - DNA, 20 bp, synthetic construct
  source 1..20: mol_type = other DNA
ctctcactctgggatcttgc

SEQ ID NO: 6740 - DNA, 20 bp, synthetic construct
  source 1..20: mol_type = other DNA
ctctcgtccccttctccgtc

SEQ ID NO: 6741 - DNA, 20 bp, synthetic construct
  source 1..20: mol_type = other DNA
ctctctgcaatgtcaacgac

SEQ ID NO: 6742 - DNA, 20 bp, synthetic construct
  source 1..20: mol_type = other DNA
ctctgaaggctggatccaac

SEQ ID NO: 6743 - DNA, 21 bp, synthetic construct
  source 1..21: mol_type = other DNA
ctctgaaggctggatccaact

SEQ ID NO: 6744 - DNA, 20 bp, synthetic construct
  source 1..20: mol_type = other DNA
ctctgcaagatcccagagtg

SEQ ID NO: 6745 - DNA, 20 bp, synthetic construct
  source 1..20: mol_type = other DNA
ctctgccgatccatactgcg

SEQ ID NO: 6746 - DNA, 20 bp, synthetic construct
  source 1..20: mol_type = other DNA
ctctgggatcttgcagagtt

SEQ ID NO: 6747 - DNA, 21 bp, synthetic construct
  source 1..21: mol_type = other DNA
ctctgggattctttcccgacc

SEQ ID NO: 6748 - DNA, 20 bp, synthetic construct
  source 1..20: mol_type = other DNA
ctctgtatcgggaagcctta

SEQ ID NO: 6749 - DNA, 20 bp, synthetic construct
  source 1..20: mol_type = other DNA
ctcttatgtaagaccttggg

SEQ ID NO: 6750 - DNA, 20 bp, synthetic construct
  source 1..20: mol_type = other DNA
ctcttccaaaagtgagacaa

SEQ ID NO: 6751 - DNA, 20 bp, synthetic construct
  source 1..20: mol_type = other DNA
ctctttgttttgttagggtt

SEQ ID NO: 6752 - DNA, 20 bp, synthetic construct
  source 1..20: mol_type = other DNA
ctgaaagccaaacagtgggg

SEQ ID NO: 6753 - DNA, 20 bp, synthetic construct
  source 1..20: mol_type = other DNA
ctgaactggagccaccagca

SEQ ID NO: 6754 - DNA, 21 bp, synthetic construct
  source 1..21: mol_type = other DNA
ctgaactggagccaccagcag

SEQ ID NO: 6755 - DNA, 20 bp, synthetic construct
  source 1..20: mol_type = other DNA
ctgaaggaaagaagtcagaa

SEQ ID NO: 6756 - DNA, 20 bp, synthetic construct
  source 1..20: mol_type = other DNA
ctgacgcaacccccactggc

SEQ ID NO: 6757 - DNA, 20 bp, synthetic construct
  source 1..20: mol_type = other DNA
ctgactactaggtctctaga

SEQ ID NO: 6758 - DNA, 20 bp, synthetic construct
  source 1..20: mol_type = other DNA
ctgacttctttccttcagta

SEQ ID NO: 6759 - DNA, 20 bp, synthetic construct
  source 1..20: mol_type = other DNA
ctgagccaggagaaacgggc

SEQ ID NO: 6760 - DNA, 20 bp, synthetic construct
  source 1..20: mol_type = other DNA
ctgaggatgagtgtttctca

SEQ ID NO: 6761 - DNA, 20 bp, synthetic construct
  source 1..20: mol_type = other DNA
ctgagggctccaccccaaaa

SEQ ID NO: 6762 - DNA, 20 bp, synthetic construct
  source 1..20: mol_type = other DNA
ctgagtgcagtatggtgagg

SEQ ID NO: 6763 - DNA, 20 bp, synthetic construct
  source 1..20: mol_type = other DNA
ctgcaagatcccagagtgag

SEQ ID NO: 6764 - DNA, 20 bp, synthetic construct
  source 1..20: mol_type = other DNA
ctgcatgactactgctcaag

SEQ ID NO: 6765 - DNA, 20 bp, synthetic construct
  source 1..20: mol_type = other DNA
ctgccaactggatcctgcgc

SEQ ID NO: 6766 - DNA, 20 bp, synthetic construct
  source 1..20: mol_type = other DNA
ctgccggaccgtgtgcactt

SEQ ID NO: 6767 - DNA, 20 bp, synthetic construct
  source 1..20: mol_type = other DNA
ctgccgttccgaccgaccac

SEQ ID NO: 6768 - DNA, 20 bp, synthetic construct
  source 1..20: mol_type = other DNA
ctgcctccaccaatcgccag

SEQ ID NO: 6769 - DNA, 20 bp, synthetic construct
  source 1..20: mol_type = other DNA
ctgccttcctgtctggcgat

SEQ ID NO: 6770 - DNA, 21 bp, synthetic construct
  source 1..21: mol_type = other DNA
ctgcgaattttggccaagaca

SEQ ID NO: 6771 - DNA, 20 bp, synthetic construct
  source 1..20: mol_type = other DNA
ctgcgagcaaaacaagcggc

SEQ ID NO: 6772 - DNA, 21 bp, synthetic construct
  source 1..21: mol_type = other DNA
ctgcgagcaaaacaagcggct

SEQ ID NO: 6773 - DNA, 20 bp, synthetic construct
  source 1..20: mol_type = other DNA
ctgctgcgagcaaaacaagc

SEQ ID NO: 6774 - DNA, 20 bp, synthetic construct
  source 1..20: mol_type = other DNA
ctgctggtggctccagttca

SEQ ID NO: 6775 - DNA, 20 bp, synthetic construct
  source 1..20: mol_type = other DNA
ctggaattagaggacaaacg

SEQ ID NO: 6776 - DNA, 20 bp, synthetic construct
  source 1..20: mol_type = other DNA
ctggatccaactggtggtcg

SEQ ID NO: 6777 - DNA, 20 bp, synthetic construct
  source 1..20: mol_type = other DNA
ctggccagacgccaacaagg

SEQ ID NO: 6778 - DNA, 20 bp, synthetic construct
  source 1..20: mol_type = other DNA
ctggccaggtgtccttgttg

SEQ ID NO: 6779 - DNA, 20 bp, synthetic construct
  source 1..20: mol_type = other DNA
ctggccgttgccgggcaacg

SEQ ID NO: 6780 - DNA, 20 bp, synthetic construct
  source 1..20: mol_type = other DNA
ctggcgattggtggaggcag

SEQ ID NO: 6781 - DNA, 20 bp, synthetic construct
  source 1..20: mol_type = other DNA
ctggctggggcttggtcatg

SEQ ID NO: 6782 - DNA, 20 bp, synthetic construct
  source 1..20: mol_type = other DNA
ctgggaggagttgggggagg

SEQ ID NO: 6783 - DNA, 20 bp, synthetic construct
  source 1..20: mol_type = other DNA
ctggggggaactaatgactc

SEQ ID NO: 6784 - DNA, 20 bp, synthetic construct
  source 1..20: mol_type = other DNA
ctgggtgggtgttaatttgg

SEQ ID NO: 6785 - DNA, 20 bp, synthetic construct
  source 1..20: mol_type = other DNA
ctgggtttcaccccaccgca

SEQ ID NO: 6786 - DNA, 20 bp, synthetic construct
  source 1..20: mol_type = other DNA
ctggtgcgcagaccaattta

SEQ ID NO: 6787 - DNA, 20 bp, synthetic construct
  source 1..20: mol_type = other DNA
ctgtaacacgagaaggggtc

SEQ ID NO: 6788 - DNA, 20 bp, synthetic construct
  source 1..20: mol_type = other DNA
ctgtacagacttggccccca

SEQ ID NO: 6789 - DNA, 20 bp, synthetic construct
  source 1..20: mol_type = other DNA
ctgtaccaaaccttcggacg

SEQ ID NO: 6790 - DNA, 21 bp, synthetic construct
  source 1..21: mol_type = other DNA
ctgtatttccctgctggtggc

SEQ ID NO: 6791 - DNA, 20 bp, synthetic construct
  source 1..20: mol_type = other DNA
ctgtctggcgattggtggag

SEQ ID NO: 6792 - DNA, 20 bp, synthetic construct
  source 1..20: mol_type = other DNA
ctgtctttaatcctcattgg

SEQ ID NO: 6793 - DNA, 20 bp, synthetic construct
  source 1..20: mol_type = other DNA
ctgtgccaagtgtttgctga

SEQ ID NO: 6794 - DNA, 20 bp, synthetic construct
  source 1..20: mol_type = other DNA
ctgtgccttgggtggctttg

SEQ ID NO: 6795 - DNA, 20 bp, synthetic construct
  source 1..20: mol_type = other DNA
ctgtgctgccaactggatcc

SEQ ID NO: 6796 - DNA, 20 bp, synthetic construct
  source 1..20: mol_type = other DNA
ctgtgtttgctctgaaggct

SEQ ID NO: 6797 - DNA, 20 bp, synthetic construct
  source 1..20: mol_type = other DNA
ctgttaataggaagttttct

SEQ ID NO: 6798 - DNA, 20 bp, synthetic construct
  source 1..20: mol_type = other DNA
ctgttcaagcctccaagctg

SEQ ID NO: 6799 - DNA, 20 bp, synthetic construct
  source 1..20: mol_type = other DNA
ctgttgctgtaccaaacctt

SEQ ID NO: 6800 - DNA, 20 bp, synthetic construct
  source 1..20: mol_type = other DNA
ctgttgttagacgacgaggc

SEQ ID NO: 6801 - DNA, 20 bp, synthetic construct
  source 1..20: mol_type = other DNA
ctgtttggctttcagttata

SEQ ID NO: 6802 - DNA, 20 bp, synthetic construct
  source 1..20: mol_type = other DNA
ctgtttgtttaaagactggg

SEQ ID NO: 6803 - DNA, 20 bp, synthetic construct
  source 1..20: mol_type = other DNA
cttacaaggcctttctgtgt

SEQ ID NO: 6804 - DNA, 21 bp, synthetic construct
  source 1..21: mol_type = other DNA
cttacaaggcctttctgtgta

SEQ ID NO: 6805 - DNA, 20 bp, synthetic construct
  source 1..20: mol_type = other DNA
cttacagttaatgagaaaag

SEQ ID NO: 6806 - DNA, 20 bp, synthetic construct
  source 1..20: mol_type = other DNA
cttatccaatggtaaatatt

SEQ ID NO: 6807 - DNA, 20 bp, synthetic construct
  source 1..20: mol_type = other DNA
cttatcgtcaatcttctcga

SEQ ID NO: 6808 - DNA, 20 bp, synthetic construct
  source 1..20: mol_type = other DNA
cttatgagtccaaggaatac

SEQ ID NO: 6809 - DNA, 20 bp, synthetic construct
  source 1..20: mol_type = other DNA
cttcaaagactgtttgttta

SEQ ID NO: 6810 - DNA, 20 bp, synthetic construct
  source 1..20: mol_type = other DNA
cttcacctctgcacgtcgca

SEQ ID NO: 6811 - DNA, 20 bp, synthetic construct
  source 1..20: mol_type = other DNA
cttccaaattaacacccacc

SEQ ID NO: 6812 - DNA, 20 bp, synthetic construct
  source 1..20: mol_type = other DNA
cttccaatgacataacccat

SEQ ID NO: 6813 - DNA, 20 bp, synthetic construct
  source 1..20: mol_type = other DNA
cttccggaaactactgttgt

SEQ ID NO: 6814 - DNA, 20 bp, synthetic construct
  source 1..20: mol_type = other DNA
cttcctattaacaggcctat

SEQ ID NO: 6815 - DNA, 20 bp, synthetic construct
  source 1..20: mol_type = other DNA
cttcctgtctggcgattggt

SEQ ID NO: 6816 - DNA, 20 bp, synthetic construct
  source 1..20: mol_type = other DNA
cttctctcaattttctaggg

SEQ ID NO: 6817 - DNA, 20 bp, synthetic construct
  source 1..20: mol_type = other DNA
cttctgcgacgcggcgattg

SEQ ID NO: 6818 - DNA, 20 bp, synthetic construct
  source 1..20: mol_type = other DNA
cttcttttctcattaactgt

SEQ ID NO: 6819 - DNA, 20 bp, synthetic construct
  source 1..20: mol_type = other DNA
cttgaacagtaggacatgaa

SEQ ID NO: 6820 - DNA, 20 bp, synthetic construct
  source 1..20: mol_type = other DNA
cttgcctgagtgcagtatgg

SEQ ID NO: 6821 - DNA, 20 bp, synthetic construct
  source 1..20: mol_type = other DNA
cttggcacagacctggccgt

SEQ ID NO: 6822 - DNA, 20 bp, synthetic construct
  source 1..20: mol_type = other DNA
cttgggtggctttggggcat

SEQ ID NO: 6823 - DNA, 20 bp, synthetic construct
  source 1..20: mol_type = other DNA
cttggtgtaaatgtatatta

SEQ ID NO: 6824 - DNA, 20 bp, synthetic construct
  source 1..20: mol_type = other DNA
cttgtaagttggcgagaaag

SEQ ID NO: 6825 - DNA, 20 bp, synthetic construct
  source 1..20: mol_type = other DNA
cttgtcaacaagaaaaaccc

SEQ ID NO: 6826 - DNA, 20 bp, synthetic construct
  source 1..20: mol_type = other DNA
cttgtctcacttttggaaga

SEQ ID NO: 6827 - DNA, 20 bp, synthetic construct
  source 1..20: mol_type = other DNA
cttgttcatgtcctactgtt

SEQ ID NO: 6828 - DNA, 20 bp, synthetic construct
  source 1..20: mol_type = other DNA
cttgttgacaagaatcctca

SEQ ID NO: 6829 - DNA, 20 bp, synthetic construct
  source 1..20: mol_type = other DNA
ctttaaacaaacagtctttg

SEQ ID NO: 6830 - DNA, 20 bp, synthetic construct
  source 1..20: mol_type = other DNA
ctttaggcccatattagtgt

SEQ ID NO: 6831 - DNA, 20 bp, synthetic construct
  source 1..20: mol_type = other DNA
ctttccaccagcaatcctct

SEQ ID NO: 6832 - DNA, 20 bp, synthetic construct
  source 1..20: mol_type = other DNA
ctttcggaaaattcctatgg

SEQ ID NO: 6833 - DNA, 20 bp, synthetic construct
  source 1..20: mol_type = other DNA
ctttctgtgtaaacaatacc

SEQ ID NO: 6834 - DNA, 20 bp, synthetic construct
  source 1..20: mol_type = other DNA
ctttgagaaacactcatcct

SEQ ID NO: 6835 - DNA, 21 bp, synthetic construct
  source 1..21: mol_type = other DNA
ctttggataaaacctagcagg

SEQ ID NO: 6836 - DNA, 20 bp, synthetic construct
  source 1..20: mol_type = other DNA
ctttgtactaggaggctgta

SEQ ID NO: 6837 - DNA, 20 bp, synthetic construct
  source 1..20: mol_type = other DNA
ctttgtttacgtcccgtcgg

SEQ ID NO: 6838 - DNA, 20 bp, synthetic construct
  source 1..20: mol_type = other DNA
cttttctcattaactgtaag

SEQ ID NO: 6839 - DNA, 21 bp, synthetic construct
  source 1..21: mol_type = other DNA
cttttggaagagaaaccgtta

SEQ ID NO: 6840 - DNA, 20 bp, synthetic construct
  source 1..20: mol_type = other DNA
cttttggggtggagccctca

SEQ ID NO: 6841 - DNA, 20 bp, synthetic construct
  source 1..20: mol_type = other DNA
gaaaaaccccgcctgtaaca

SEQ ID NO: 6842 - DNA, 20 bp, synthetic construct
  source 1..20: mol_type = other DNA
gaaaagatggtgttttccaa

SEQ ID NO: 6843 - DNA, 21 bp, synthetic construct
  source 1..21: mol_type = other DNA
gaaaagatggtgttttccaat

SEQ ID NO: 6844 - DNA, 21 bp, synthetic construct
  source 1..21: mol_type = other DNA
gaaaattgagagaagtccacc

SEQ ID NO: 6845 - DNA, 20 bp, synthetic construct
  source 1..20: mol_type = other DNA
gaaaattggtaacagcggta

SEQ ID NO: 6846 - DNA, 21 bp, synthetic construct
  source 1..21: mol_type = other DNA
gaaacactcatcctcaggcca

SEQ ID NO: 6847 - DNA, 20 bp, synthetic construct
  source 1..20: mol_type = other DNA
gaaacccagcccgaatgctc

SEQ ID NO: 6848 - DNA, 20 bp, synthetic construct
  source 1..20: mol_type = other DNA
gaaagacaccaaatactcta

SEQ ID NO: 6849 - DNA, 21 bp, synthetic construct
  source 1..21: mol_type = other DNA
gaaagacaccaaatactctat

SEQ ID NO: 6850 - DNA, 20 bp, synthetic construct
  source 1..20: mol_type = other DNA
gaaagccaaacagtggggga

SEQ ID NO: 6851 - DNA, 20 bp, synthetic construct
  source 1..20: mol_type = other DNA
gaaagcccaggatgatggga

SEQ ID NO: 6852 - DNA, 21 bp, synthetic construct
  source 1..21: mol_type = other DNA
gaaagcccaggatgatgggat

SEQ ID NO: 6853 - DNA, 21 bp, synthetic construct
  source 1..21: mol_type = other DNA
gaaagccctacgaaccactga

SEQ ID NO: 6854 - DNA, 20 bp, synthetic construct
  source 1..20: mol_type = other DNA
gaaaggccttgtaagttggc

SEQ ID NO: 6855 - DNA, 20 bp, synthetic construct
  source 1..20: mol_type = other DNA
gaaagtatgtcaacgaattg

SEQ ID NO: 6856 - DNA, 21 bp, synthetic construct
  source 1..21: mol_type = other DNA
gaaagtgaaagcctgcttaga

SEQ ID NO: 6857 - DNA, 20 bp, synthetic construct
  source 1..20: mol_type = other DNA
gaaatacaggcctctcactc

SEQ ID NO: 6858 - DNA, 20 bp, synthetic construct
  source 1..20: mol_type = other DNA
gaacaagagatgattaggca

SEQ ID NO: 6859 - DNA, 20 bp, synthetic construct
  source 1..20: mol_type = other DNA
gaacaagatctacagcatgg

SEQ ID NO: 6860 - DNA, 20 bp, synthetic construct
  source 1..20: mol_type = other DNA
gaacaatgctcaggagactc

SEQ ID NO: 6861 - DNA, 20 bp, synthetic construct
  source 1..20: mol_type = other DNA
gaacacatcatacaaaaaat

SEQ ID NO: 6862 - DNA, 20 bp, synthetic construct
  source 1..20: mol_type = other DNA
gaacagggtttactgctcct

SEQ ID NO: 6863 - DNA, 20 bp, synthetic construct
  source 1..20: mol_type = other DNA
gaacagtaggacatgaacaa

SEQ ID NO: 6864 - DNA, 20 bp, synthetic construct
  source 1..20: mol_type = other DNA
gaacatcacatcaggattcc

SEQ ID NO: 6865 - DNA, 20 bp, synthetic construct
  source 1..20: mol_type = other DNA
gaacatggagaacatcacat

SEQ ID NO: 6866 - DNA, 20 bp, synthetic construct
  source 1..20: mol_type = other DNA
gaacctgcatgactactgct

SEQ ID NO: 6867 - DNA, 20 bp, synthetic construct
  source 1..20: mol_type = other DNA
gaacctttaccccgttgccc

SEQ ID NO: 6868 - DNA, 21 bp, synthetic construct
  source 1..21: mol_type = other DNA
gaacgcccaccgaatgttgcc

SEQ ID NO: 6869 - DNA, 20 bp, synthetic construct
  source 1..20: mol_type = other DNA
gaactaccgtgtgtcttggc

SEQ ID NO: 6870 - DNA, 20 bp, synthetic construct
  source 1..20: mol_type = other DNA
gaactccctcgcctcgcaga

SEQ ID NO: 6871 - DNA, 20 bp, synthetic construct
  source 1..20: mol_type = other DNA
ggacttctctcaattttcta

SEQ ID NO: 6872 - DNA, 20 bp, synthetic construct
  source 1..20: mol_type = other DNA
gaactcctagccgcttgttt

SEQ ID NO: 6873 - DNA, 20 bp, synthetic construct
  source 1..20: mol_type = other DNA
gaactggagccaccagcagg

SEQ ID NO: 6874 - DNA, 20 bp, synthetic construct
  source 1..20: mol_type = other DNA
gaagaaccaacaagaagatg

SEQ ID NO: 6875 - DNA, 21 bp, synthetic construct
  source 1..21: mol_type = other DNA
gtccaccacgagtctagactc

SEQ ID NO: 6876 - DNA, 20 bp, synthetic construct
  source 1..20: mol_type = other DNA
gaagaagaactccctcgcct

SEQ ID NO: 6877 - DNA, 21 bp, synthetic construct
  source 1..21: mol_type = other DNA
gaagatctcaatctcgggaac

SEQ ID NO: 6878 - DNA, 20 bp, synthetic construct
  source 1..20: mol_type = other DNA
gaagatctcgtactgaagga

SEQ ID NO: 6879 - DNA, 21 bp, synthetic construct
  source 1..21: mol_type = other DNA
gaagatctcgtactgaaggaa

SEQ ID NO: 6880 - DNA, 20 bp, synthetic construct
  source 1..20: mol_type = other DNA
gaagatgaggcatagcagca

SEQ ID NO: 6881 - DNA, 20 bp, synthetic construct
  source 1..20: mol_type = other DNA
gaagattgacgataagggag

SEQ ID NO: 6882 - DNA, 21 bp, synthetic construct
  source 1..21: mol_type = other DNA
gaagattgacgataagggaga

SEQ ID NO: 6883 - DNA, 20 bp, synthetic construct
  source 1..20: mol_type = other DNA
gaagcgaagtgcacacggtc

SEQ ID NO: 6884 - DNA, 20 bp, synthetic construct
  source 1..20: mol_type = other DNA
gaaggaaagaagtcagaagg

SEQ ID NO: 6885 - DNA, 20 bp, synthetic construct
  source 1..20: mol_type = other DNA
gaaggcacagacggggagtc

SEQ ID NO: 6886 - DNA, 20 bp, synthetic construct
  source 1..20: mol_type = other DNA
gaaggcgggtatattatata

SEQ ID NO: 6887 - DNA, 20 bp, synthetic construct
  source 1..20: mol_type = other DNA
gaaggggacgagagagtccc

SEQ ID NO: 6888 - DNA, 20 bp, synthetic construct
  source 1..20: mol_type = other DNA
gaagggtcgtccgcaggatt

SEQ ID NO: 6889 - DNA, 20 bp, synthetic construct
  source 1..20: mol_type = other DNA
gaaggtctcaatcgccgcgt

SEQ ID NO: 6890 - DNA, 20 bp, synthetic construct
  source 1..20: mol_type = other DNA
gaaggtttggtacagcaaca

SEQ ID NO: 6891 - DNA, 20 bp, synthetic construct
  source 1..20: mol_type = other DNA
gaagtcagaaggcaaaaacg

SEQ ID NO: 6892 - DNA, 20 bp, synthetic construct
  source 1..20: mol_type = other DNA
gaagttatgggtccttgcca

SEQ ID NO: 6893 - DNA, 21 bp, synthetic construct
  source 1..21: mol_type = other DNA
gaatactaacattgaggttcc

SEQ ID NO: 6894 - DNA, 20 bp, synthetic construct
  source 1..20: mol_type = other DNA
gaatatggtgacccacaaaa

SEQ ID NO: 6895 - DNA, 21 bp, synthetic construct
  source 1..21: mol_type = other DNA
gaatccacactccgaaagaca

SEQ ID NO: 6896 - DNA, 20 bp, synthetic construct
  source 1..20: mol_type = other DNA
gaatcccagaggattgctgg

SEQ ID NO: 6897 - DNA, 21 bp, synthetic construct
  source 1..21: mol_type = other DNA
gaattgcttgcctgagtgcag

SEQ ID NO: 6898 - DNA, 20 bp, synthetic construct
  source 1..20: mol_type = other DNA
gacaaaagaaaattggtaac

SEQ ID NO: 6899 - DNA, 20 bp, synthetic construct
  source 1..20: mol_type = other DNA
gacaaacgggcaacatacct

SEQ ID NO: 6900 - DNA, 21 bp, synthetic construct
  source 1..21: mol_type = other DNA
gacaaacgggcaacatacctt

SEQ ID NO: 6901 - DNA, 20 bp, synthetic construct
  source 1..20: mol_type = other DNA
gacaacagagttatcagtcc

SEQ ID NO: 6902 - DNA, 21 bp, synthetic construct
  source 1..21: mol_type = other DNA
gacaacagagttatcagtccc

SEQ ID NO: 6903 - DNA, 20 bp, synthetic construct
  source 1..20: mol_type = other DNA
gacaagaaatgtgaaaccac

SEQ ID NO: 6904 - DNA, 20 bp, synthetic construct
  source 1..20: mol_type = other DNA
gacaagaatcctcacaatac

SEQ ID NO: 6905 - DNA, 20 bp, synthetic construct
  source 1..20: mol_type = other DNA
gacacacggtagttccccct

SEQ ID NO: 6906 - DNA, 21 bp, synthetic construct
  source 1..21: mol_type = other DNA
gacacacggtagttcccccta

SEQ ID NO: 6907 - DNA, 20 bp, synthetic construct
  source 1..20: mol_type = other DNA
gacacatccagcgataacca

SEQ ID NO: 6908 - DNA, 20 bp, synthetic construct
  source 1..20: mol_type = other DNA
gacacctggccagacgccaa

SEQ ID NO: 6909 - DNA, 20 bp, synthetic construct
  source 1..20: mol_type = other DNA
gacactatttacacactcta

SEQ ID NO: 6910 - DNA, 20 bp, synthetic construct
  source 1..20: mol_type = other DNA
gacaggaaggcagcctaccc

SEQ ID NO: 6911 - DNA, 20 bp, synthetic construct
  source 1..20: mol_type = other DNA
gacaggtacagtagaagaat

SEQ ID NO: 6912 - DNA, 20 bp, synthetic construct
  source 1..20: mol_type = other DNA
gacataacccataaaattca

SEQ ID NO: 6913 - DNA, 20 bp, synthetic construct
  source 1..20: mol_type = other DNA
gacatactttccaatcaata

SEQ ID NO: 6914 - DNA, 20 bp, synthetic construct
  source 1..20: mol_type = other DNA
gacatgaacaagagatgatt

SEQ ID NO: 6915 - DNA, 20 bp, synthetic construct
  source 1..20: mol_type = other DNA
gaccaagccccagccagtgg

SEQ ID NO: 6916 - DNA, 20 bp, synthetic construct
  source 1..20: mol_type = other DNA
gaccaccgtgaacgcccacc

SEQ ID NO: 6917 - DNA, 20 bp, synthetic construct
  source 1..20: mol_type = other DNA
gaccccgagaagggtcgtcc

SEQ ID NO: 6918 - DNA, 21 bp, synthetic construct
  source 1..21: mol_type = other DNA
gaccccgagaagggtcgtccg

SEQ ID NO: 6919 - DNA, 21 bp, synthetic construct
  source 1..21: mol_type = other DNA
gaccccttctcgtgttacagg

SEQ ID NO: 6920 - DNA, 20 bp, synthetic construct
  source 1..20: mol_type = other DNA
gaccctgcgctgaacatgga

SEQ ID NO: 6921 - DNA, 20 bp, synthetic construct
  source 1..20: mol_type = other DNA
gacccttataaagaatttgg

SEQ ID NO: 6922 - DNA, 20 bp, synthetic construct
  source 1..20: mol_type = other DNA
gacccttctcggggtcgctt

SEQ ID NO: 6923 - DNA, 20 bp, synthetic construct
  source 1..20: mol_type = other DNA
gacctagtagtcagttatgt

SEQ ID NO: 6924 - DNA, 20 bp, synthetic construct
  source 1..20: mol_type = other DNA
gacctgctgcgagcaaaaca

SEQ ID NO: 6925 - DNA, 21 bp, synthetic construct
  source 1..21: mol_type = other DNA
gacctggccgttgccgggcaa

SEQ ID NO: 6926 - DNA, 20 bp, synthetic construct
  source 1..20: mol_type = other DNA
gaccttcgtctgcgaggcga

SEQ ID NO: 6927 - DNA, 20 bp, synthetic construct
  source 1..20: mol_type = other DNA
gaccttgaggcatacttcaa

SEQ ID NO: 6928 - DNA, 20 bp, synthetic construct
  source 1..20: mol_type = other DNA
gaccttgggcaacattcggt

SEQ ID NO: 6929 - DNA, 20 bp, synthetic construct
  source 1..20: mol_type = other DNA
gacgacgaggcaggtcccct

SEQ ID NO: 6930 - DNA, 20 bp, synthetic construct
  source 1..20: mol_type = other DNA
gacgaggcaggtcccctaga

SEQ ID NO: 6931 - DNA, 20 bp, synthetic construct
  source 1..20: mol_type = other DNA
gacgcaacccccactggctg

SEQ ID NO: 6932 - DNA, 20 bp, synthetic construct
  source 1..20: mol_type = other DNA
gacgccaacaaggtaggagc

SEQ ID NO: 6933 - DNA, 20 bp, synthetic construct
  source 1..20: mol_type = other DNA
gacggggagtccgcgtaaag

SEQ ID NO: 6934 - DNA, 20 bp, synthetic construct
  source 1..20: mol_type = other DNA
gacgtaaacaaaggacgtcc

SEQ ID NO: 6935 - DNA, 21 bp, synthetic construct
  source 1..21: mol_type = other DNA
gactactgcctctcccttatc

SEQ ID NO: 6936 - DNA, 20 bp, synthetic construct
  source 1..20: mol_type = other DNA
gactcgtggtggacttctct

SEQ ID NO: 6937 - DNA, 20 bp, synthetic construct
  source 1..20: mol_type = other DNA
gactctaaggcttcccgata

SEQ ID NO: 6938 - DNA, 20 bp, synthetic construct
  source 1..20: mol_type = other DNA
gactgggaggagttggggga

SEQ ID NO: 6939 - DNA, 20 bp, synthetic construct
  source 1..20: mol_type = other DNA
gactgtttgtttaaagactg

SEQ ID NO: 6940 - DNA, 20 bp, synthetic construct
  source 1..20: mol_type = other DNA
gttccgcagtatggatcggc

SEQ ID NO: 6941 - DNA, 20 bp, synthetic construct
  source 1..20: mol_type = other DNA
gacttctttccttcagtacg

SEQ ID NO: 6942 - DNA, 20 bp, synthetic construct
  source 1..20: mol_type = other DNA
gagaaagtgaaagcctgctt

SEQ ID NO: 6943 - DNA, 20 bp, synthetic construct
  source 1..20: mol_type = other DNA
gagaagattgacgataaggg

SEQ ID NO: 6944 - DNA, 21 bp, synthetic construct
  source 1..21: mol_type = other DNA
taaaacgccgcagacacatcc

SEQ ID NO: 6945 - DNA, 20 bp, synthetic construct
  source 1..20: mol_type = other DNA
gagaccttcgtctgcgaggc

SEQ ID NO: 6946 - DNA, 20 bp, synthetic construct
  source 1..20: mol_type = other DNA
gagagagtcccaagcgaccc

SEQ ID NO: 6947 - DNA, 20 bp, synthetic construct
  source 1..20: mol_type = other DNA
gagaggcagtagtcggaaca

SEQ ID NO: 6948 - DNA, 21 bp, synthetic construct
  source 1..21: mol_type = other DNA
gagagtaactccacagtagct

SEQ ID NO: 6949 - DNA, 20 bp, synthetic construct
  source 1..20: mol_type = other DNA
gagagtcccaagcgaccccg

SEQ ID NO: 6950 - DNA, 20 bp, synthetic construct
  source 1..20: mol_type = other DNA
gagatgattaggcagaggtg

SEQ ID NO: 6951 - DNA, 21 bp, synthetic construct
  source 1..21: mol_type = other DNA
gagatgattaggcagaggtga

SEQ ID NO: 6952 - DNA, 20 bp, synthetic construct
  source 1..20: mol_type = other DNA
gagattgagatcttctgcga

SEQ ID NO: 6953 - DNA, 20 bp, synthetic construct
  source 1..20: mol_type = other DNA
gagcagtagtcatgcaggtt

SEQ ID NO: 6954 - DNA, 20 bp, synthetic construct
  source 1..20: mol_type = other DNA
gagccaccagcagggaaata

SEQ ID NO: 6955 - DNA, 20 bp, synthetic construct
  source 1..20: mol_type = other DNA
gagccaggagaaacgggctg

SEQ ID NO: 6956 - DNA, 20 bp, synthetic construct
  source 1..20: mol_type = other DNA
gagcctgagggctccacccc

SEQ ID NO: 6957 - DNA, 20 bp, synthetic construct
  source 1..20: mol_type = other DNA
gagctgaggcggtatctaga

SEQ ID NO: 6958 - DNA, 21 bp, synthetic construct
  source 1..21: mol_type = other DNA
gaggacaaacgggcaacatac

SEQ ID NO: 6959 - DNA, 21 bp, synthetic construct
  source 1..21: mol_type = other DNA
gaggacaacagagttatcagt

SEQ ID NO: 6960 - DNA, 20 bp, synthetic construct
  source 1..20: mol_type = other DNA
gaggacaggaggttggtgag

SEQ ID NO: 6961 - DNA, 20 bp, synthetic construct
  source 1..20: mol_type = other DNA
gaggactcttggactctctg

SEQ ID NO: 6962 - DNA, 20 bp, synthetic construct
  source 1..20: mol_type = other DNA
gaggagccgaaaaggttcca

SEQ ID NO: 6963 - DNA, 20 bp, synthetic construct
  source 1..20: mol_type = other DNA
gaggagttgggggaggagat

SEQ ID NO: 6964 - DNA, 20 bp, synthetic construct
  source 1..20: mol_type = other DNA
gaggattcttgtcaacaaga

SEQ ID NO: 6965 - DNA, 20 bp, synthetic construct
  source 1..20: mol_type = other DNA
gaggattggggaccctgcgc

SEQ ID NO: 6966 - DNA, 20 bp, synthetic construct
  source 1..20: mol_type = other DNA
gaggcaggaggcggatttgc

SEQ ID NO: 6967 - DNA, 20 bp, synthetic construct
  source 1..20: mol_type = other DNA
gaggcaggtcccctagaaga

SEQ ID NO: 6968 - DNA, 20 bp, synthetic construct
  source 1..20: mol_type = other DNA
gaggcatagcagcaggatga

SEQ ID NO: 6969 - DNA, 20 bp, synthetic construct
  source 1..20: mol_type = other DNA
gaggcttgaacagtaggaca

SEQ ID NO: 6970 - DNA, 20 bp, synthetic construct
  source 1..20: mol_type = other DNA
gagggagttcttcttctagg

SEQ ID NO: 6971 - DNA, 20 bp, synthetic construct
  source 1..20: mol_type = other DNA
gaggtgaaaaagttgcatgg

SEQ ID NO: 6972 - DNA, 21 bp, synthetic construct
  source 1..21: mol_type = other DNA
gaggtgaaaaagttgcatggt

SEQ ID NO: 6973 - DNA, 20 bp, synthetic construct
  source 1..20: mol_type = other DNA
gaggtgaagcgaagtgcaca

SEQ ID NO: 6974 - DNA, 20 bp, synthetic construct
  source 1..20: mol_type = other DNA
gagtaactccacagtagctc

SEQ ID NO: 6975 - DNA, 20 bp, synthetic construct
  source 1..20: mol_type = other DNA
gagtcattagttccccccag

SEQ ID NO: 6976 - DNA, 21 bp, synthetic construct
  source 1..21: mol_type = other DNA
gagtccaaggaatactaacat

SEQ ID NO: 6977 - DNA, 20 bp, synthetic construct
  source 1..20: mol_type = other DNA
gagtcccaagcgaccccgag

SEQ ID NO: 6978 - DNA, 21 bp, synthetic construct
  source 1..21: mol_type = other DNA
gagtccctttttaccgctgtt

SEQ ID NO: 6979 - DNA, 20 bp, synthetic construct
  source 1..20: mol_type = other DNA
gagtgcgaatccacactccg

SEQ ID NO: 6980 - DNA, 20 bp, synthetic construct
  source 1..20: mol_type = other DNA
gagtttggtgaaaggttgtg

SEQ ID NO: 6981 - DNA, 20 bp, synthetic construct
  source 1..20: mol_type = other DNA
gataaccacattgtgtaaat

SEQ ID NO: 6982 - DNA, 20 bp, synthetic construct
  source 1..20: mol_type = other DNA
gataaccaggacaagttgga

SEQ ID NO: 6983 - DNA, 20 bp, synthetic construct
  source 1..20: mol_type = other DNA
gataagggagaggcagtagt

SEQ ID NO: 6984 - DNA, 20 bp, synthetic construct
  source 1..20: mol_type = other DNA
gataatgtttgctccagacc

SEQ ID NO: 6985 - DNA, 20 bp, synthetic construct
  source 1..20: mol_type = other DNA
gatacgatgtatatttgcgg

SEQ ID NO: 6986 - DNA, 20 bp, synthetic construct
  source 1..20: mol_type = other DNA
gataggataggggcatttgg

SEQ ID NO: 6987 - DNA, 20 bp, synthetic construct
  source 1..20: mol_type = other DNA
gatagtccagaagaaccaac

SEQ ID NO: 6988 - DNA, 20 bp, synthetic construct
  source 1..20: mol_type = other DNA
gatccaactggtggtcggga

SEQ ID NO: 6989 - DNA, 20 bp, synthetic construct
  source 1..20: mol_type = other DNA
gatccatactgcggaactcc

SEQ ID NO: 6990 - DNA, 20 bp, synthetic construct
  source 1..20: mol_type = other DNA
gatcctcaaccaccagcacg

SEQ ID NO: 6991 - DNA, 20 bp, synthetic construct
  source 1..20: mol_type = other DNA
gatcggcagaggagccgaaa

SEQ ID NO: 6992 - DNA, 20 bp, synthetic construct
  source 1..20: mol_type = other DNA
gatctcaatctcgggaacct

SEQ ID NO: 6993 - DNA, 20 bp, synthetic construct
  source 1..20: mol_type = other DNA
gatctcgtactgaaggaaag

SEQ ID NO: 6994 - DNA, 20 bp, synthetic construct
  source 1..20: mol_type = other DNA
gatcttctagataccgcctc

SEQ ID NO: 6995 - DNA, 20 bp, synthetic construct
  source 1..20: mol_type = other DNA
gatcttgcagagtttggtga

SEQ ID NO: 6996 - DNA, 20 bp, synthetic construct
  source 1..20: mol_type = other DNA
gatgagaaggcacagacggg

SEQ ID NO: 6997 - DNA, 20 bp, synthetic construct
  source 1..20: mol_type = other DNA
gatgaggcatagcagcagga

SEQ ID NO: 6998 - DNA, 20 bp, synthetic construct
  source 1..20: mol_type = other DNA
gatgagtgtttctcaaaggt

SEQ ID NO: 6999 - DNA, 20 bp, synthetic construct
  source 1..20: mol_type = other DNA
gatgatgtggtattgggggc

SEQ ID NO: 7000 - DNA, 20 bp, synthetic construct
  source 1..20: mol_type = other DNA
gatgattaggcagaggtgaa

SEQ ID NO: 7001 - DNA, 20 bp, synthetic construct
  source 1..20: mol_type = other DNA
gatggcccatgaccaagccc

SEQ ID NO: 7002 - DNA, 20 bp, synthetic construct
  source 1..20: mol_type = other DNA
gatgtgatgttctccatgtt

SEQ ID NO: 7003 - DNA, 20 bp, synthetic construct
  source 1..20: mol_type = other DNA
gatgttctccatgttcagcg

SEQ ID NO: 7004 - DNA, 20 bp, synthetic construct
  source 1..20: mol_type = other DNA
gattaaagacaggtacagta

SEQ ID NO: 7005 - DNA, 21 bp, synthetic construct
  source 1..21: mol_type = other DNA
gattaaagacaggtacagtag

SEQ ID NO: 7006 - DNA, 20 bp, synthetic construct
  source 1..20: mol_type = other DNA
gattaaaggtctttgtacta

SEQ ID NO: 7007 - DNA, 20 bp, synthetic construct
  source 1..20: mol_type = other DNA
gattaactagatgttctgga

SEQ ID NO: 7008 - DNA, 20 bp, synthetic construct
  source 1..20: mol_type = other DNA
gattcagcgccgacgggacg

SEQ ID NO: 7009 - DNA, 20 bp, synthetic construct
  source 1..20: mol_type = other DNA
gattgaatacatgcatacaa

SEQ ID NO: 7010 - DNA, 20 bp, synthetic construct
  source 1..20: mol_type = other DNA
gattgacgataagggagagg

SEQ ID NO: 7011 - DNA, 21 bp, synthetic construct
  source 1..21: mol_type = other DNA
gattgacgataagggagaggc

SEQ ID NO: 7012 - DNA, 20 bp, synthetic construct
  source 1..20: mol_type = other DNA
gattgagaccttcgtctgcg

SEQ ID NO: 7013 - DNA, 20 bp, synthetic construct
  source 1..20: mol_type = other DNA
gattgagatcttctgcgacg

SEQ ID NO: 7014 - DNA, 21 bp, synthetic construct
  source 1..21: mol_type = other DNA
gattgagatcttctgcgacgc

SEQ ID NO: 7015 - DNA, 21 bp, synthetic construct
  source 1..21: mol_type = other DNA
gattgcaattgattatgcctg

SEQ ID NO: 7016 - DNA, 20 bp, synthetic construct
  source 1..20: mol_type = other DNA
gattgctggtggaaagattc

SEQ ID NO: 7017 - DNA, 20 bp, synthetic construct
  source 1..20: mol_type = other DNA
gattggaggttggggactgc

SEQ ID NO: 7018 - DNA, 20 bp, synthetic construct
  source 1..20: mol_type = other DNA
gattgggacttcaatcccaa

SEQ ID NO: 7019 - DNA, 20 bp, synthetic construct
  source 1..20: mol_type = other DNA
gattggtggaggcaggaggc

SEQ ID NO: 7020 - DNA, 20 bp, synthetic construct
  source 1..20: mol_type = other DNA
gatttgctgtgtttgctctg

SEQ ID NO: 7021 - DNA, 20 bp, synthetic construct
  source 1..20: mol_type = other DNA
gcaaacacttggcacagacc

SEQ ID NO: 7022 - DNA, 20 bp, synthetic construct
  source 1..20: mol_type = other DNA
gcaaacattatcgggactga

SEQ ID NO: 7023 - DNA, 21 bp, synthetic construct
  source 1..21: mol_type = other DNA
gcaaagaattgcttgcctgag

SEQ ID NO: 7024 - DNA, 20 bp, synthetic construct
  source 1..20: mol_type = other DNA
gcaaagtttgtagtatgccc

SEQ ID NO: 7025 - DNA, 20 bp, synthetic construct
  source 1..20: mol_type = other DNA
gcaaatatacatcgtatcca

SEQ ID NO: 7026 - DNA, 20 bp, synthetic construct
  source 1..20: mol_type = other DNA
gcaaatccagattgggactt

SEQ ID NO: 7027 - DNA, 21 bp, synthetic construct
  source 1..21: mol_type = other DNA
gcaaatccgcctcctgcctcc

SEQ ID NO: 7028 - DNA, 20 bp, synthetic construct
  source 1..20: mol_type = other DNA
gcaacaggagggatacatag

SEQ ID NO: 7029 - DNA, 20 bp, synthetic construct
  source 1..20: mol_type = other DNA
gcaacataccttgatagtcc

SEQ ID NO: 7030 - DNA, 20 bp, synthetic construct
  source 1..20: mol_type = other DNA
gcaacggccaggtctgtgcc

SEQ ID NO: 7031 - DNA, 20 bp, synthetic construct
  source 1..20: mol_type = other DNA
gcaactttttcacctctgcc

SEQ ID NO: 7032 - DNA, 20 bp, synthetic construct
  source 1..20: mol_type = other DNA
gcaagcaattctttgctggg

SEQ ID NO: 7033 - DNA, 20 bp, synthetic construct
  source 1..20: mol_type = other DNA
gcaatgtcaacgaccgacct

SEQ ID NO: 7034 - DNA, 20 bp, synthetic construct
  source 1..20: mol_type = other DNA
gcaatttccgtccgaaggtt

SEQ ID NO: 7035 - DNA, 20 bp, synthetic construct
  source 1..20: mol_type = other DNA
gcacacggtccggcagatga

SEQ ID NO: 7036 - DNA, 20 bp, synthetic construct
  source 1..20: mol_type = other DNA
gcacagacctggccgttgcc

SEQ ID NO: 7037 - DNA, 20 bp, synthetic construct
  source 1..20: mol_type = other DNA
gcacagacggggagtccgcg

SEQ ID NO: 7038 - DNA, 21 bp, synthetic construct
  source 1..21: mol_type = other DNA
gcacagcctagcagccatgga

SEQ ID NO: 7039 - DNA, 20 bp, synthetic construct
  source 1..20: mol_type = other DNA
gcacagcttggaggcttgaa

SEQ ID NO: 7040 - DNA, 20 bp, synthetic construct
  source 1..20: mol_type = other DNA
gcacggaggccttttggggt

SEQ ID NO: 7041 - DNA, 20 bp, synthetic construct
  source 1..20: mol_type = other DNA
gcacgggaccatgccgaacc

SEQ ID NO: 7042 - DNA, 20 bp, synthetic construct
  source 1..20: mol_type = other DNA
gcactagtaaactgagccag

SEQ ID NO: 7043 - DNA, 20 bp, synthetic construct
  source 1..20: mol_type = other DNA
gcactcctccagcttataga

SEQ ID NO: 7044 - DNA, 20 bp, synthetic construct
  source 1..20: mol_type = other DNA
gcagaagatctcaatctcgg

SEQ ID NO: 7045 - DNA, 20 bp, synthetic construct
  source 1..20: mol_type = other DNA
gcagacacatccagcgataa

SEQ ID NO: 7046 - DNA, 20 bp, synthetic construct
  source 1..20: mol_type = other DNA
gcagaccaatttatgcctac

SEQ ID NO: 7047 - DNA, 20 bp, synthetic construct
  source 1..20: mol_type = other DNA
gcagacggagaaggggacga

SEQ ID NO: 7048 - DNA, 20 bp, synthetic construct
  source 1..20: mol_type = other DNA
gcagaggtgaaaaagttgca

SEQ ID NO: 7049 - DNA, 21 bp, synthetic construct
  source 1..21: mol_type = other DNA
gcagaggtgaagcgaagtgca

SEQ ID NO: 7050 - DNA, 20 bp, synthetic construct
  source 1..20: mol_type = other DNA
gcagagtctagactcgtggt

SEQ ID NO: 7051 - DNA, 20 bp, synthetic construct
  source 1..20: mol_type = other DNA
gcagatgagaaggcacagac

SEQ ID NO: 7052 - DNA, 21 bp, synthetic construct
  source 1..21: mol_type = other DNA
gcagatgagaaggcacagacg

SEQ ID NO: 7053 - DNA, 20 bp, synthetic construct
  source 1..20: mol_type = other DNA
gcagcacagcctagcagcca

SEQ ID NO: 7054 - DNA, 20 bp, synthetic construct
  source 1..20: mol_type = other DNA
gcaggaggcggatttgctgg

SEQ ID NO: 7055 - DNA, 20 bp, synthetic construct
  source 1..20: mol_type = other DNA
gcaggataaccacattgtgt

SEQ ID NO: 7056 - DNA, 20 bp, synthetic construct
  source 1..20: mol_type = other DNA
gcaggatccagttggcagca

SEQ ID NO: 7057 - DNA, 20 bp, synthetic construct
  source 1..20: mol_type = other DNA
gcaggctttcactttctcgc

SEQ ID NO: 7058 - DNA, 20 bp, synthetic construct
  source 1..20: mol_type = other DNA
gcagggtccccaatcctcga

SEQ ID NO: 7059 - DNA, 20 bp, synthetic construct
  source 1..20: mol_type = other DNA
gcaggttcggcatggtcccg

SEQ ID NO: 7060 - DNA, 21 bp, synthetic construct
  source 1..21: mol_type = other DNA
gcaggttcggcatggtcccgt

SEQ ID NO: 7061 - DNA, 21 bp, synthetic construct
  source 1..21: mol_type = other DNA
gcagtagtcatgcaggttcgg

SEQ ID NO: 7062 - DNA, 20 bp, synthetic construct
  source 1..20: mol_type = other DNA
gcagtatggatcggcagagg

SEQ ID NO: 7063 - DNA, 20 bp, synthetic construct
  source 1..20: mol_type = other DNA
gcataaattggtctgcgcac

SEQ ID NO: 7064 - DNA, 20 bp, synthetic construct
  source 1..20: mol_type = other DNA
gcatacaagggcattaacgc

SEQ ID NO: 7065 - DNA, 20 bp, synthetic construct
  source 1..20: mol_type = other DNA
gcatagcagcaggatgaaga

SEQ ID NO: 7066 - DNA, 21 bp, synthetic construct
  source 1..21: mol_type = other DNA
gcatagcagcaggatgaagag

SEQ ID NO: 7067 - DNA, 20 bp, synthetic construct
  source 1..20: mol_type = other DNA
gcatctagagacctagtagt

SEQ ID NO: 7068 - DNA, 20 bp, synthetic construct
  source 1..20: mol_type = other DNA
gcatggacatcgacccttat

SEQ ID NO: 7069 - DNA, 21 bp, synthetic construct
  source 1..21: mol_type = other DNA
gcatggacatcgacccttata

SEQ ID NO: 7070 - DNA, 20 bp, synthetic construct
  source 1..20: mol_type = other DNA
gcatgtattcaatctaagca

SEQ ID NO: 7071 - DNA, 20 bp, synthetic construct
  source 1..20: mol_type = other DNA
gcatttggtggtctataagc

SEQ ID NO: 7072 - DNA, 20 bp, synthetic construct
  source 1..20: mol_type = other DNA
gccaacaaggtaggagctgg

SEQ ID NO: 7073 - DNA, 20 bp, synthetic construct
  source 1..20: mol_type = other DNA
gccaagtctgtacagcatct

SEQ ID NO: 7074 - DNA, 20 bp, synthetic construct
  source 1..20: mol_type = other DNA
gccacaagaacacatcatac

SEQ ID NO: 7075 - DNA, 21 bp, synthetic construct
  source 1..21: mol_type = other DNA
gccacaagaacacatcataca

SEQ ID NO: 7076 - DNA, 20 bp, synthetic construct
  source 1..20: mol_type = other DNA
gccaccagcagggaaataca

SEQ ID NO: 7077 - DNA, 20 bp, synthetic construct
  source 1..20: mol_type = other DNA
gccacccaaggcacagcttg

SEQ ID NO: 7078 - DNA, 20 bp, synthetic construct
  source 1..20: mol_type = other DNA
gccagacgccaacaaggtag

SEQ ID NO: 7079 - DNA, 21 bp, synthetic construct
  source 1..21: mol_type = other DNA
gccaggtgtccttgttgggat

SEQ ID NO: 7080 - DNA, 20 bp, synthetic construct
  source 1..20: mol_type = other DNA
gccagtgggggttgcgtcag

SEQ ID NO: 7081 - DNA, 20 bp, synthetic construct
  source 1..20: mol_type = other DNA
gccatttgttcagtggttcg

SEQ ID NO: 7082 - DNA, 20 bp, synthetic construct
  source 1..20: mol_type = other DNA
gcccaaggtcttacataaga

SEQ ID NO: 7083 - DNA, 20 bp, synthetic construct
  source 1..20: mol_type = other DNA
gcccacttacagttaatgag

SEQ ID NO: 7084 - DNA, 20 bp, synthetic construct
  source 1..20: mol_type = other DNA
gcccatgaccaagccccagc

SEQ ID NO: 7085 - DNA, 20 bp, synthetic construct
  source 1..20: mol_type = other DNA
gccccgtggtcggtcggaac

SEQ ID NO: 7086 - DNA, 20 bp, synthetic construct
  source 1..20: mol_type = other DNA
gcccgtttgtcctctaattc

SEQ ID NO: 7087 - DNA, 20 bp, synthetic construct
  source 1..20: mol_type = other DNA
gccgacgggacgtaaacaaa

SEQ ID NO: 7088 - DNA, 20 bp, synthetic construct
  source 1..20: mol_type = other DNA
gccgcagacacatccagcga

SEQ ID NO: 7089 - DNA, 20 bp, synthetic construct
  source 1..20: mol_type = other DNA
gccgcttgttttgctcgcag

SEQ ID NO: 7090 - DNA, 21 bp, synthetic construct
  source 1..21: mol_type = other DNA
gccgggcaacggggtaaaggt

SEQ ID NO: 7091 - DNA, 20 bp, synthetic construct
  source 1..20: mol_type = other DNA
gccgttccgaccgaccacgg

SEQ ID NO: 7092 - DNA, 20 bp, synthetic construct
  source 1..20: mol_type = other DNA
gccgttgccgggcaacgggg

SEQ ID NO: 7093 - DNA, 21 bp, synthetic construct
  source 1..21: mol_type = other DNA
gccgttgccgggcaacggggt

SEQ ID NO: 7094 - DNA, 21 bp, synthetic construct
  source 1..21: mol_type = other DNA
gcctaaagttcaggcaactct

SEQ ID NO: 7095 - DNA, 21 bp, synthetic construct
  source 1..21: mol_type = other DNA
gcctacaaactgttcacattt

SEQ ID NO: 7096 - DNA, 20 bp, synthetic construct
  source 1..20: mol_type = other DNA
gcctacagcctcctagtaca

SEQ ID NO: 7097 - DNA, 21 bp, synthetic construct
  source 1..21: mol_type = other DNA
gcctcagcccgtttctcctgg

SEQ ID NO: 7098 - DNA, 20 bp, synthetic construct
  source 1..20: mol_type = other DNA
gcctcagctctgtatcggga

SEQ ID NO: 7099 - DNA, 20 bp, synthetic construct
  source 1..20: mol_type = other DNA
gcctccaccaatcgccagac

SEQ ID NO: 7100 - DNA, 20 bp, synthetic construct
  source 1..20: mol_type = other DNA
gcctcgtcgtctaacaacag

SEQ ID NO: 7101 - DNA, 21 bp, synthetic construct
  source 1..21: mol_type = other DNA
gcctctcactctgggatcttg

SEQ ID NO: 7102 - DNA, 20 bp, synthetic construct
  source 1..20: mol_type = other DNA
gcctgaggatgagtgtttct

SEQ ID NO: 7103 - DNA, 21 bp, synthetic construct
  source 1..21: mol_type = other DNA
gcctgaggatgagtgtttctc

SEQ ID NO: 7104 - DNA, 20 bp, synthetic construct
  source 1..20: mol_type = other DNA
gcctgagggctccaccccaa

SEQ ID NO: 7105 - DNA, 20 bp, synthetic construct
  source 1..20: mol_type = other DNA
gcctgctaggttttatccaa

SEQ ID NO: 7106 - DNA, 20 bp, synthetic construct
  source 1..20: mol_type = other DNA
gcctgcttagattgaataca

SEQ ID NO: 7107 - DNA, 20 bp, synthetic construct
  source 1..20: mol_type = other DNA
gcctgtatttccctgctggt

SEQ ID NO: 7108 - DNA, 20 bp, synthetic construct
  source 1..20: mol_type = other DNA
gccttcagagcaaacacagc

SEQ ID NO: 7109 - DNA, 20 bp, synthetic construct
  source 1..20: mol_type = other DNA
gccttctgacttctttcctt

SEQ ID NO: 7110 - DNA, 20 bp, synthetic construct
  source 1..20: mol_type = other DNA
gccttttggggtggagccct

SEQ ID NO: 7111 - DNA, 20 bp, synthetic construct
  source 1..20: mol_type = other DNA
gcgaagtgcacacggtccgg

SEQ ID NO: 7112 - DNA, 20 bp, synthetic construct
  source 1..20: mol_type = other DNA
gcgaatccacactccgaaag

SEQ ID NO: 7113 - DNA, 20 bp, synthetic construct
  source 1..20: mol_type = other DNA
gcgacgtgcagaggtgaagc

SEQ ID NO: 7114 - DNA, 20 bp, synthetic construct
  source 1..20: mol_type = other DNA
gcgagcaaaacaagcggcta

SEQ ID NO: 7115 - DNA, 20 bp, synthetic construct
  source 1..20: mol_type = other DNA
gcgagggagttcttcttcta

SEQ ID NO: 7116 - DNA, 20 bp, synthetic construct
  source 1..20: mol_type = other DNA
gcgataaccaggacaagttg

SEQ ID NO: 7117 - DNA, 20 bp, synthetic construct
  source 1..20: mol_type = other DNA
gcgattgagaccttcgtctg

SEQ ID NO: 7118 - DNA, 20 bp, synthetic construct
  source 1..20: mol_type = other DNA
gcgcagggtccccaatcctc

SEQ ID NO: 7119 - DNA, 20 bp, synthetic construct
  source 1..20: mol_type = other DNA
gcgccgacgggacgtaaaca

SEQ ID NO: 7120 - DNA, 20 bp, synthetic construct
  source 1..20: mol_type = other DNA
gcgcgtgcgtggaacctttt

SEQ ID NO: 7121 - DNA, 20 bp, synthetic construct
  source 1..20: mol_type = other DNA
gcgctgatggcccatgacca

SEQ ID NO: 7122 - DNA, 21 bp, synthetic construct
  source 1..21: mol_type = other DNA
gcgggagaggacaacagagtt

SEQ ID NO: 7123 - DNA, 20 bp, synthetic construct
  source 1..20: mol_type = other DNA
gcggggtttttcttgttgac

SEQ ID NO: 7124 - DNA, 20 bp, synthetic construct
  source 1..20: mol_type = other DNA
gcgggtatattatataagag

SEQ ID NO: 7125 - DNA, 20 bp, synthetic construct
  source 1..20: mol_type = other DNA
gcgtcagcaaacacttggca

SEQ ID NO: 7126 - DNA, 20 bp, synthetic construct
  source 1..20: mol_type = other DNA
gctaggctgtgctgccaact

SEQ ID NO: 7127 - DNA, 20 bp, synthetic construct
  source 1..20: mol_type = other DNA
gctatgcctcatcttcttgt

SEQ ID NO: 7128 - DNA, 21 bp, synthetic construct
  source 1..21: mol_type = other DNA
gctcaggagactctaaggctt

SEQ ID NO: 7129 - DNA, 20 bp, synthetic construct
  source 1..20: mol_type = other DNA
gctccagacctgctgcgagc

SEQ ID NO: 7130 - DNA, 20 bp, synthetic construct
  source 1..20: mol_type = other DNA
gctccagctcctaccttgtt

SEQ ID NO: 7131 - DNA, 20 bp, synthetic construct
  source 1..20: mol_type = other DNA
gctcctaccttgttggcgtc

SEQ ID NO: 7132 - DNA, 20 bp, synthetic construct
  source 1..20: mol_type = other DNA
gctcctctgccgatccatac

SEQ ID NO: 7133 - DNA, 20 bp, synthetic construct
  source 1..20: mol_type = other DNA
gctcctgaactggagccacc

SEQ ID NO: 7134 - DNA, 20 bp, synthetic construct
  source 1..20: mol_type = other DNA
gctcgcagcaggtctggagc

SEQ ID NO: 7135 - DNA, 20 bp, synthetic construct
  source 1..20: mol_type = other DNA
gctctgtatcgggaagcctt

SEQ ID NO: 7136 - DNA, 20 bp, synthetic construct
  source 1..20: mol_type = other DNA
gctgaggcccactcccatag

SEQ ID NO: 7137 - DNA, 20 bp, synthetic construct
  source 1..20: mol_type = other DNA
gctgccaactggatcctgcg

SEQ ID NO: 7138 - DNA, 20 bp, synthetic construct
  source 1..20: mol_type = other DNA
gctgccccatttacacaatg

SEQ ID NO: 7139 - DNA, 20 bp, synthetic construct
  source 1..20: mol_type = other DNA
gctgcgagcaaaacaagcgg

SEQ ID NO: 7140 - DNA, 21 bp, synthetic construct
  source 1..21: mol_type = other DNA
gctgctaggctgtgctgccaa

SEQ ID NO: 7141 - DNA, 20 bp, synthetic construct
  source 1..20: mol_type = other DNA
tccgcagtatggatcggcag

SEQ ID NO: 7142 - DNA, 20 bp, synthetic construct
  source 1..20: mol_type = other DNA
gctggatccaactggtggtc

SEQ ID NO: 7143 - DNA, 20 bp, synthetic construct
  source 1..20: mol_type = other DNA
gctggtggctccagttcagg

SEQ ID NO: 7144 - DNA, 20 bp, synthetic construct
  source 1..20: mol_type = other DNA
gctggtggttgaggatcctg

SEQ ID NO: 7145 - DNA, 20 bp, synthetic construct
  source 1..20: mol_type = other DNA
gctgtaccaaaccttcggac

SEQ ID NO: 7146 - DNA, 20 bp, synthetic construct
  source 1..20: mol_type = other DNA
gctgtagatcttgttcccaa

SEQ ID NO: 7147 - DNA, 20 bp, synthetic construct
  source 1..20: mol_type = other DNA
gctgtaggcataaattggtc

SEQ ID NO: 7148 - DNA, 20 bp, synthetic construct
  source 1..20: mol_type = other DNA
gctgtgccttgggtggcttt

SEQ ID NO: 7149 - DNA, 20 bp, synthetic construct
  source 1..20: mol_type = other DNA
gctgtgtttgctctgaaggc

SEQ ID NO: 7150 - DNA, 20 bp, synthetic construct
  source 1..20: mol_type = other DNA
gcttcccgatacagagctga

SEQ ID NO: 7151 - DNA, 21 bp, synthetic construct
  source 1..21: mol_type = other DNA
gcttgcctgagtgcagtatgg

SEQ ID NO: 7152 - DNA, 20 bp, synthetic construct
  source 1..20: mol_type = other DNA
gcttggaggcttgaacagta

SEQ ID NO: 7153 - DNA, 20 bp, synthetic construct
  source 1..20: mol_type = other DNA
gcttggtcatgggccatcag

SEQ ID NO: 7154 - DNA, 21 bp, synthetic construct
  source 1..21: mol_type = other DNA
gctttcccccactgtttggct

SEQ ID NO: 7155 - DNA, 20 bp, synthetic construct
  source 1..20: mol_type = other DNA
gctttcggaaaattcctatg

SEQ ID NO: 7156 - DNA, 20 bp, synthetic construct
  source 1..20: mol_type = other DNA
ggaaaattcctatgggagtg

SEQ ID NO: 7157 - DNA, 20 bp, synthetic construct
  source 1..20: mol_type = other DNA
ggaaagaagtcagaaggcaa

SEQ ID NO: 7158 - DNA, 21 bp, synthetic construct
  source 1..21: mol_type = other DNA
ggaaagattctgccccatgct

SEQ ID NO: 7159 - DNA, 20 bp, synthetic construct
  source 1..20: mol_type = other DNA
ggaaagccctacgaaccact

SEQ ID NO: 7160 - DNA, 21 bp, synthetic construct
  source 1..21: mol_type = other DNA
ggaaatacaggcctctcactc

SEQ ID NO: 7161 - DNA, 20 bp, synthetic construct
  source 1..20: mol_type = other DNA
ggaacaagatctacagcatg

SEQ ID NO: 7162 - DNA, 20 bp, synthetic construct
  source 1..20: mol_type = other DNA
ggaacagggtttactgctcc

SEQ ID NO: 7163 - DNA, 20 bp, synthetic construct
  source 1..20: mol_type = other DNA
ggaacggcagacggagaagg

SEQ ID NO: 7164 - DNA, 21 bp, synthetic construct
  source 1..21: mol_type = other DNA
ggaactaatgactctagctac

SEQ ID NO: 7165 - DNA, 21 bp, synthetic construct
  source 1..21: mol_type = other DNA
ggaactaccgtgtgtcttggc

SEQ ID NO: 7166 - DNA, 21 bp, synthetic construct
  source 1..21: mol_type = other DNA
ggaagatccagcatctagaga

SEQ ID NO: 7167 - DNA, 20 bp, synthetic construct
  source 1..20: mol_type = other DNA
ggaagatgataaaacgccgc

SEQ ID NO: 7168 - DNA, 20 bp, synthetic construct
  source 1..20: mol_type = other DNA
ggaagccttagagtctcctg

SEQ ID NO: 7169 - DNA, 20 bp, synthetic construct
  source 1..20: mol_type = other DNA
ggaaggcgggtatattatat

SEQ ID NO: 7170 - DNA, 20 bp, synthetic construct
  source 1..20: mol_type = other DNA
ggaagtgttgataggatagg

SEQ ID NO: 7171 - DNA, 20 bp, synthetic construct
  source 1..20: mol_type = other DNA
ggaattagaggacaaacggg

SEQ ID NO: 7172 - DNA, 21 bp, synthetic construct
  source 1..21: mol_type = other DNA
ggacaagttggaggacaggag

SEQ ID NO: 7173 - DNA, 21 bp, synthetic construct
  source 1..21: mol_type = other DNA
ggacacctggccagacgccaa

SEQ ID NO: 7174 - DNA, 20 bp, synthetic construct
  source 1..20: mol_type = other DNA
ggacatgaacaagagatgat

SEQ ID NO: 7175 - DNA, 20 bp, synthetic construct
  source 1..20: mol_type = other DNA
ggaccccttctcgtgttaca

SEQ ID NO: 7176 - DNA, 20 bp, synthetic construct
  source 1..20: mol_type = other DNA
ggaccctgcgctgaacatgg

SEQ ID NO: 7177 - DNA, 20 bp, synthetic construct
  source 1..20: mol_type = other DNA
ggacctgcctcgtcgtctaa

SEQ ID NO: 7178 - DNA, 21 bp, synthetic construct
  source 1..21: mol_type = other DNA
ggacctgcctcgtcgtctaac

SEQ ID NO: 7179 - DNA, 20 bp, synthetic construct
  source 1..20: mol_type = other DNA
tcctctgccgatccatactg

SEQ ID NO: 7180 - DNA, 21 bp, synthetic construct
  source 1..21: mol_type = other DNA
ggagaccaccgtgaacgccca

SEQ ID NO: 7181 - DNA, 20 bp, synthetic construct
  source 1..20: mol_type = other DNA
ggagaggacaacagagttat

SEQ ID NO: 7182 - DNA, 20 bp, synthetic construct
  source 1..20: mol_type = other DNA
ggagaggcagtagtcggaac

SEQ ID NO: 7183 - DNA, 20 bp, synthetic construct
  source 1..20: mol_type = other DNA
ggagcaaacattatcgggac

SEQ ID NO: 7184 - DNA, 20 bp, synthetic construct
  source 1..20: mol_type = other DNA
ggagctggagcattcgggct

SEQ ID NO: 7185 - DNA, 20 bp, synthetic construct
  source 1..20: mol_type = other DNA
ggaggttggtgagtgattgg

SEQ ID NO: 7186 - DNA, 20 bp, synthetic construct
  source 1..20: mol_type = other DNA
ggagtccgcgtaaagagagg

SEQ ID NO: 7187 - DNA, 20 bp, synthetic construct
  source 1..20: mol_type = other DNA
ggagtgcgaatccacactcc

SEQ ID NO: 7188 - DNA, 20 bp, synthetic construct
  source 1..20: mol_type = other DNA
ggagttccgcagtatggatc

SEQ ID NO: 7189 - DNA, 21 bp, synthetic construct
  source 1..21: mol_type = other DNA
ggataaaacctagcaggcata

SEQ ID NO: 7190 - DNA, 20 bp, synthetic construct
  source 1..20: mol_type = other DNA
ggataaccacattgtgtaaa

SEQ ID NO: 7191 - DNA, 20 bp, synthetic construct
  source 1..20: mol_type = other DNA
ggatacatagaggttccttg

SEQ ID NO: 7192 - DNA, 20 bp, synthetic construct
  source 1..20: mol_type = other DNA
ggatacgatgtatatttgcg

SEQ ID NO: 7193 - DNA, 20 bp, synthetic construct
  source 1..20: mol_type = other DNA
ggatccaactggtggtcggg

SEQ ID NO: 7194 - DNA, 21 bp, synthetic construct
  source 1..21: mol_type = other DNA
ggatccaactggtggtcggga

SEQ ID NO: 7195 - DNA, 20 bp, synthetic construct
  source 1..20: mol_type = other DNA
ggatcctcaaccaccagcac

SEQ ID NO: 7196 - DNA, 20 bp, synthetic construct
  source 1..20: mol_type = other DNA
ggatcctggaattagaggac

SEQ ID NO: 7197 - DNA, 20 bp, synthetic construct
  source 1..20: mol_type = other DNA
ggatcggcagaggagccgaa

SEQ ID NO: 7198 - DNA, 20 bp, synthetic construct
  source 1..20: mol_type = other DNA
ggatcttgcagagtttggtg

SEQ ID NO: 7199 - DNA, 20 bp, synthetic construct
  source 1..20: mol_type = other DNA
ggatgaagaggaagatgata

SEQ ID NO: 7200 - DNA, 20 bp, synthetic construct
  source 1..20: mol_type = other DNA
ggatgagtgtttctcaaagg

SEQ ID NO: 7201 - DNA, 20 bp, synthetic construct
  source 1..20: mol_type = other DNA
ggatgatgggatgggaatac

SEQ ID NO: 7202 - DNA, 20 bp, synthetic construct
  source 1..20: mol_type = other DNA
ggattaaagacaggtacagt

SEQ ID NO: 7203 - DNA, 21 bp, synthetic construct
  source 1..21: mol_type = other DNA
ggattctttcccgaccaccag

SEQ ID NO: 7204 - DNA, 20 bp, synthetic construct
  source 1..20: mol_type = other DNA
ggatttgctggcaaagtttg

SEQ ID NO: 7205 - DNA, 20 bp, synthetic construct
  source 1..20: mol_type = other DNA
ggatttgctgtgtttgctct

SEQ ID NO: 7206 - DNA, 20 bp, synthetic construct
  source 1..20: mol_type = other DNA
ggcaacataccttgatagtc

SEQ ID NO: 7207 - DNA, 20 bp, synthetic construct
  source 1..20: mol_type = other DNA
ggcaacggccaggtctgtgc

SEQ ID NO: 7208 - DNA, 20 bp, synthetic construct
  source 1..20: mol_type = other DNA
ggcaagcaattctttgctgg

SEQ ID NO: 7209 - DNA, 20 bp, synthetic construct
  source 1..20: mol_type = other DNA
ggcacagacctggccgttgc

SEQ ID NO: 7210 - DNA, 20 bp, synthetic construct
  source 1..20: mol_type = other DNA
ggcactagtaaactgagcca

SEQ ID NO: 7211 - DNA, 20 bp, synthetic construct
  source 1..20: mol_type = other DNA
ggcagacggagaaggggacg

SEQ ID NO: 7212 - DNA, 21 bp, synthetic construct
  source 1..21: mol_type = other DNA
ggcagacggagaaggggacga

SEQ ID NO: 7213 - DNA, 20 bp, synthetic construct
  source 1..20: mol_type = other DNA
ggcagatgagaaggcacaga

SEQ ID NO: 7214 - DNA, 21 bp, synthetic construct
  source 1..21: mol_type = other DNA
ggcagcaaaacccaaaagacc

SEQ ID NO: 7215 - DNA, 21 bp, synthetic construct
  source 1..21: mol_type = other DNA
ggcaggaggcggatttgctgg

SEQ ID NO: 7216 - DNA, 20 bp, synthetic construct
  source 1..20: mol_type = other DNA
ggcatactacaaactttgcc

SEQ ID NO: 7217 - DNA, 21 bp, synthetic construct
  source 1..21: mol_type = other DNA
ggcatactacaaactttgcca

SEQ ID NO: 7218 - DNA, 20 bp, synthetic construct
  source 1..20: mol_type = other DNA
ggcatagcagcaggatgaag

SEQ ID NO: 7219 - DNA, 20 bp, synthetic construct
  source 1..20: mol_type = other DNA
ggcatggacatcgaccctta

SEQ ID NO: 7220 - DNA, 20 bp, synthetic construct
  source 1..20: mol_type = other DNA
ggccagacgccaacaaggta

SEQ ID NO: 7221 - DNA, 20 bp, synthetic construct
  source 1..20: mol_type = other DNA
ggcccacttacagttaatga

SEQ ID NO: 7222 - DNA, 20 bp, synthetic construct
  source 1..20: mol_type = other DNA
ggcccatattagtgttgaca

SEQ ID NO: 7223 - DNA, 20 bp, synthetic construct
  source 1..20: mol_type = other DNA
ggcctcagcccgtttctcct

SEQ ID NO: 7224 - DNA, 20 bp, synthetic construct
  source 1..20: mol_type = other DNA
ggcctccgtgcggtggggtg

SEQ ID NO: 7225 - DNA, 20 bp, synthetic construct
  source 1..20: mol_type = other DNA
ggcctctcactctgggatct

SEQ ID NO: 7226 - DNA, 20 bp, synthetic construct
  source 1..20: mol_type = other DNA
ggcctgtatttccctgctgg

SEQ ID NO: 7227 - DNA, 20 bp, synthetic construct
  source 1..20: mol_type = other DNA
ggccttgtaagttggcgaga

SEQ ID NO: 7228 - DNA, 21 bp, synthetic construct
  source 1..21: mol_type = other DNA
ggcgagaaagtgaaagcctgc

SEQ ID NO: 7229 - DNA, 20 bp, synthetic construct
  source 1..20: mol_type = other DNA
ggcgagggagttcttcttct

SEQ ID NO: 7230 - DNA, 20 bp, synthetic construct
  source 1..20: mol_type = other DNA
ggcgattggtggaggcagga

SEQ ID NO: 7231 - DNA, 21 bp, synthetic construct
  source 1..21: mol_type = other DNA
ggcgattggtggaggcaggag

SEQ ID NO: 7232 - DNA, 21 bp, synthetic construct
  source 1..21: mol_type = other DNA
ggcggatttgctggcaaagtt

SEQ ID NO: 7233 - DNA, 20 bp, synthetic construct
  source 1..20: mol_type = other DNA
ggcggggtttttcttgttga

SEQ ID NO: 7234 - DNA, 21 bp, synthetic construct
  source 1..21: mol_type = other DNA
ggcggggtttttcttgttgac

SEQ ID NO: 7235 - DNA, 20 bp, synthetic construct
  source 1..20: mol_type = other DNA
ggcgggtatattatataaga

SEQ ID NO: 7236 - DNA, 20 bp, synthetic construct
  source 1..20: mol_type = other DNA
ggcgttcacggtggtctcca

SEQ ID NO: 7237 - DNA, 20 bp, synthetic construct
  source 1..20: mol_type = other DNA
ggctaggagttccgcagtat

SEQ ID NO: 7238 - DNA, 20 bp, synthetic construct
  source 1..20: mol_type = other DNA
ggctccagttcaggagcagt

SEQ ID NO: 7239 - DNA, 20 bp, synthetic construct
  source 1..20: mol_type = other DNA
ggctgaggcccactcccata

SEQ ID NO: 7240 - DNA, 20 bp, synthetic construct
  source 1..20: mol_type = other DNA
ggctggatccaactggtggt

SEQ ID NO: 7241 - DNA, 20 bp, synthetic construct
  source 1..20: mol_type = other DNA
ggcttcccgatacagagctg

SEQ ID NO: 7242 - DNA, 21 bp, synthetic construct
  source 1..21: mol_type = other DNA
ggcttcccgatacagagctga

SEQ ID NO: 7243 - DNA, 21 bp, synthetic construct
  source 1..21: mol_type = other DNA
ggctttcagttatatggatga

SEQ ID NO: 7244 - DNA, 20 bp, synthetic construct
  source 1..20: mol_type = other DNA
ggctttcggaaaattcctat

SEQ ID NO: 7245 - DNA, 20 bp, synthetic construct
  source 1..20: mol_type = other DNA
gggaaagaatcccagaggat

SEQ ID NO: 7246 - DNA, 21 bp, synthetic construct
  source 1..21: mol_type = other DNA
gggaaagaatcccagaggatt

SEQ ID NO: 7247 - DNA, 20 bp, synthetic construct
  source 1..20: mol_type = other DNA
gggaaagccctacgaaccac

SEQ ID NO: 7248 - DNA, 20 bp, synthetic construct
  source 1..20: mol_type = other DNA
gggaacaagatctacagcat

SEQ ID NO: 7249 - DNA, 20 bp, synthetic construct
  source 1..20: mol_type = other DNA
gggaagccttagagtctcct

SEQ ID NO: 7250 - DNA, 20 bp, synthetic construct
  source 1..20: mol_type = other DNA
gggaccatgccgaacctgca

SEQ ID NO: 7251 - DNA, 20 bp, synthetic construct
  source 1..20: mol_type = other DNA
gggaccctgcgctgaacatg

SEQ ID NO: 7252 - DNA, 20 bp, synthetic construct
  source 1..20: mol_type = other DNA
gggactgcgaattttggcca

SEQ ID NO: 7253 - DNA, 20 bp, synthetic construct
  source 1..20: mol_type = other DNA
gggagaggcagtagtcggaa

SEQ ID NO: 7254 - DNA, 21 bp, synthetic construct
  source 1..21: mol_type = other DNA
gggaggagttgggggaggaga

SEQ ID NO: 7255 - DNA, 20 bp, synthetic construct
  source 1..20: mol_type = other DNA
gggatacatagaggttcctt

SEQ ID NO: 7256 - DNA, 21 bp, synthetic construct
  source 1..21: mol_type = other DNA
gggatacatagaggttccttg

SEQ ID NO: 7257 - DNA, 20 bp, synthetic construct
  source 1..20: mol_type = other DNA
gggatcttgcagagtttggt

SEQ ID NO: 7258 - DNA, 21 bp, synthetic construct
  source 1..21: mol_type = other DNA
gggatcttgcagagtttggtg

SEQ ID NO: 7259 - DNA, 21 bp, synthetic construct
  source 1..21: mol_type = other DNA
gggcaacattcggtgggcgtt

SEQ ID NO: 7260 - DNA, 20 bp, synthetic construct
  source 1..20: mol_type = other DNA
gggcaacggggtaaaggttc

SEQ ID NO: 7261 - DNA, 20 bp, synthetic construct
  source 1..20: mol_type = other DNA
gggcagaatctttccaccag

SEQ ID NO: 7262 - DNA, 20 bp, synthetic construct
  source 1..20: mol_type = other DNA
gggcatactacaaactttgc

SEQ ID NO: 7263 - DNA, 21 bp, synthetic construct
  source 1..21: mol_type = other DNA
gggccaagtctgtacagcatc

SEQ ID NO: 7264 - DNA, 20 bp, synthetic construct
  source 1..20: mol_type = other DNA
gggccatcagcgcgtgcgtg

SEQ ID NO: 7265 - DNA, 20 bp, synthetic construct
  source 1..20: mol_type = other DNA
gggcctcagcccgtttctcc

SEQ ID NO: 7266 - DNA, 20 bp, synthetic construct
  source 1..20: mol_type = other DNA
gggcgcacctctctttacgc

SEQ ID NO: 7267 - DNA, 20 bp, synthetic construct
  source 1..20: mol_type = other DNA
gggctgaggcccactcccat

SEQ ID NO: 7268 - DNA, 20 bp, synthetic construct
  source 1..20: mol_type = other DNA
gggcttggtcatgggccatc

SEQ ID NO: 7269 - DNA, 20 bp, synthetic construct
  source 1..20: mol_type = other DNA
gggctttcggaaaattccta

SEQ ID NO: 7270 - DNA, 21 bp, synthetic construct
  source 1..21: mol_type = other DNA
gggctttcggaaaattcctat

SEQ ID NO: 7271 - DNA, 20 bp, synthetic construct
  source 1..20: mol_type = other DNA
ggggaactaccgtgtgtctt

SEQ ID NO: 7272 - DNA, 20 bp, synthetic construct
  source 1..20: mol_type = other DNA
ggggaccctgcgctgaacat

SEQ ID NO: 7273 - DNA, 20 bp, synthetic construct
  source 1..20: mol_type = other DNA
ggggacgagagagtcccaag

SEQ ID NO: 7274 - DNA, 20 bp, synthetic construct
  source 1..20: mol_type = other DNA
ggggactgcgaattttggcc

SEQ ID NO: 7275 - DNA, 20 bp, synthetic construct
  source 1..20: mol_type = other DNA
ggggcatttggtggtctata

SEQ ID NO: 7276 - DNA, 20 bp, synthetic construct
  source 1..20: mol_type = other DNA
ggggcgcacctctctttacg

SEQ ID NO: 7277 - DNA, 20 bp, synthetic construct
  source 1..20: mol_type = other DNA
ggggcttggtcatgggccat

SEQ ID NO: 7278 - DNA, 20 bp, synthetic construct
  source 1..20: mol_type = other DNA
gggggaactaccgtgtgtct

SEQ ID NO: 7279 - DNA, 20 bp, synthetic construct
  source 1..20: mol_type = other DNA
gggggaggagattagattaa

SEQ ID NO: 7280 - DNA, 20 bp, synthetic construct
  source 1..20: mol_type = other DNA
ggggtgaaacccagcccgaa

SEQ ID NO: 7281 - DNA, 20 bp, synthetic construct
  source 1..20: mol_type = other DNA
ggggtggagccctcaggctc

SEQ ID NO: 7282 - DNA, 20 bp, synthetic construct
  source 1..20: mol_type = other DNA
ggggtttttcttgttgacaa

SEQ ID NO: 7283 - DNA, 20 bp, synthetic construct
  source 1..20: mol_type = other DNA
gggtaggctgccttcctgtc

SEQ ID NO: 7284 - DNA, 21 bp, synthetic construct
  source 1..21: mol_type = other DNA
gggtaggctgccttcctgtct

SEQ ID NO: 7285 - DNA, 20 bp, synthetic construct
  source 1..20: mol_type = other DNA
gggtatattatataagagag

SEQ ID NO: 7286 - DNA, 20 bp, synthetic construct
  source 1..20: mol_type = other DNA
gggtattaaaccttattatc

SEQ ID NO: 7287 - DNA, 21 bp, synthetic construct
  source 1..21: mol_type = other DNA
gggtcaccatattcttgggaa

SEQ ID NO: 7288 - DNA, 20 bp, synthetic construct
  source 1..20: mol_type = other DNA
gggtcctaggaatcctgatg

SEQ ID NO: 7289 - DNA, 20 bp, synthetic construct
  source 1..20: mol_type = other DNA
gggtcgatgtccatgcccca

SEQ ID NO: 7290 - DNA, 20 bp, synthetic construct
  source 1..20: mol_type = other DNA
gggtcgtccgcaggattcag

SEQ ID NO: 7291 - DNA, 20 bp, synthetic construct
  source 1..20: mol_type = other DNA
gggtggagccctcaggctca

SEQ ID NO: 7292 - DNA, 20 bp, synthetic construct
  source 1..20: mol_type = other DNA
gggtgttaatttggaagatc

SEQ ID NO: 7293 - DNA, 20 bp, synthetic construct
  source 1..20: mol_type = other DNA
gggttactctctgaatttta

SEQ ID NO: 7294 - DNA, 20 bp, synthetic construct
  source 1..20: mol_type = other DNA
gggttgcgtcagcaaacact

SEQ ID NO: 7295 - DNA, 20 bp, synthetic construct
  source 1..20: mol_type = other DNA
gggtttaaatgtatacccaa

SEQ ID NO: 7296 - DNA, 20 bp, synthetic construct
  source 1..20: mol_type = other DNA
gggtttactgctcctgaact

SEQ ID NO: 7297 - DNA, 20 bp, synthetic construct
  source 1..20: mol_type = other DNA
gggtttcaccccaccgcacg

SEQ ID NO: 7298 - DNA, 20 bp, synthetic construct
  source 1..20: mol_type = other DNA
ggtaaatatttggtaacctt

SEQ ID NO: 7299 - DNA, 20 bp, synthetic construct
  source 1..20: mol_type = other DNA
ggtaacctttggataaaacc

SEQ ID NO: 7300 - DNA, 20 bp, synthetic construct
  source 1..20: mol_type = other DNA
ggtaggagctggagcattcg

SEQ ID NO: 7301 - DNA, 20 bp, synthetic construct
  source 1..20: mol_type = other DNA
ggtaggctgccttcctgtct

SEQ ID NO: 7302 - DNA, 20 bp, synthetic construct
  source 1..20: mol_type = other DNA
ggtagttccccctagaaaat

SEQ ID NO: 7303 - DNA, 20 bp, synthetic construct
  source 1..20: mol_type = other DNA
ggtatacatttaaaccctaa

SEQ ID NO: 7304 - DNA, 20 bp, synthetic construct
  source 1..20: mol_type = other DNA
ggtattaaaccttattatcc

SEQ ID NO: 7305 - DNA, 20 bp, synthetic construct
  source 1..20: mol_type = other DNA
ggtattgtgaggattcttgt

SEQ ID NO: 7306 - DNA, 20 bp, synthetic construct
  source 1..20: mol_type = other DNA
ggtcaccatattcttgggaa

SEQ ID NO: 7307 - DNA, 20 bp, synthetic construct
  source 1..20: mol_type = other DNA
ggtcatgggccatcagcgcg

SEQ ID NO: 7308 - DNA, 20 bp, synthetic construct
  source 1..20: mol_type = other DNA
ggtcccgtgctggtggttga

SEQ ID NO: 7309 - DNA, 20 bp, synthetic construct
  source 1..20: mol_type = other DNA
ggtcgatgtccatgccccaa

SEQ ID NO: 7310 - DNA, 20 bp, synthetic construct
  source 1..20: mol_type = other DNA
ggtcggaacggcagacggag

SEQ ID NO: 7311 - DNA, 20 bp, synthetic construct
  source 1..20: mol_type = other DNA
ggtcgggaaagaatcccaga

SEQ ID NO: 7312 - DNA, 20 bp, synthetic construct
  source 1..20: mol_type = other DNA
ggtcggtcggaacggcagac

SEQ ID NO: 7313 - DNA, 20 bp, synthetic construct
  source 1..20: mol_type = other DNA
ggtcggtcgttgacattgca

SEQ ID NO: 7314 - DNA, 20 bp, synthetic construct
  source 1..20: mol_type = other DNA
ggtctcaatcgccgcgtcgc

SEQ ID NO: 7315 - DNA, 21 bp, synthetic construct
  source 1..21: mol_type = other DNA
ggtctcaatcgccgcgtcgca

SEQ ID NO: 7316 - DNA, 20 bp, synthetic construct
  source 1..20: mol_type = other DNA
ggtctccatgcgacgtgcag

SEQ ID NO: 7317 - DNA, 21 bp, synthetic construct
  source 1..21: mol_type = other DNA
ggtctctagatgctggatctt

SEQ ID NO: 7318 - DNA, 20 bp, synthetic construct
  source 1..20: mol_type = other DNA
ggtctggagcaaacattatc

SEQ ID NO: 7319 - DNA, 20 bp, synthetic construct
  source 1..20: mol_type = other DNA
ggtctgtgccaagtgtttgc

SEQ ID NO: 7320 - DNA, 20 bp, synthetic construct
  source 1..20: mol_type = other DNA
ggtgaggtgaacaatgctca

SEQ ID NO: 7321 - DNA, 20 bp, synthetic construct
  source 1..20: mol_type = other DNA
ggtgagtgattggaggttgg

SEQ ID NO: 7322 - DNA, 21 bp, synthetic construct
  source 1..21: mol_type = other DNA
ggtgcaatttccgtccgaagg

SEQ ID NO: 7323 - DNA, 20 bp, synthetic construct
  source 1..20: mol_type = other DNA
ggtgcgccccgtggtcggtc

SEQ ID NO: 7324 - DNA, 20 bp, synthetic construct
  source 1..20: mol_type = other DNA
ggtggaaagattctgcccca

SEQ ID NO: 7325 - DNA, 20 bp, synthetic construct
  source 1..20: mol_type = other DNA
ggtggagccctcaggctcag

SEQ ID NO: 7326 - DNA, 20 bp, synthetic construct
  source 1..20: mol_type = other DNA
ggtggggtgaaacccagccc

SEQ ID NO: 7327 - DNA, 20 bp, synthetic construct
  source 1..20: mol_type = other DNA
ggtggtcgggaaagaatccc

SEQ ID NO: 7328 - DNA, 21 bp, synthetic construct
  source 1..21: mol_type = other DNA
ggtggtcgggaaagaatccca

SEQ ID NO: 7329 - DNA, 20 bp, synthetic construct
  source 1..20: mol_type = other DNA
ggtggtctccatgcgacgtg

SEQ ID NO: 7330 - DNA, 21 bp, synthetic construct
  source 1..21: mol_type = other DNA
ggtggtctccatgcgacgtgc

SEQ ID NO: 7331 - DNA, 20 bp, synthetic construct
  source 1..20: mol_type = other DNA
ggtgtaaatgtatattagga

SEQ ID NO: 7332 - DNA, 20 bp, synthetic construct
  source 1..20: mol_type = other DNA
ggtgttaatttggaagatcc

SEQ ID NO: 7333 - DNA, 20 bp, synthetic construct
  source 1..20: mol_type = other DNA
ggtgttttccaatgaggatt

SEQ ID NO: 7334 - DNA, 20 bp, synthetic construct
  source 1..20: mol_type = other DNA
ggttaccaaatatttaccat

SEQ ID NO: 7335 - DNA, 20 bp, synthetic construct
  source 1..20: mol_type = other DNA
ggttactctctgaattttat

SEQ ID NO: 7336 - DNA, 20 bp, synthetic construct
  source 1..20: mol_type = other DNA
ggttatgtcattggaagtta

SEQ ID NO: 7337 - DNA, 20 bp, synthetic construct
  source 1..20: mol_type = other DNA
ggttcaggtattgtttacac

SEQ ID NO: 7338 - DNA, 20 bp, synthetic construct
  source 1..20: mol_type = other DNA
ggttccacgcacgcgctgat

SEQ ID NO: 7339 - DNA, 20 bp, synthetic construct
  source 1..20: mol_type = other DNA
ggttccttgagcagtagtca

SEQ ID NO: 7340 - DNA, 21 bp, synthetic construct
  source 1..21: mol_type = other DNA
ggttccttgagcagtagtcat

SEQ ID NO: 7341 - DNA, 20 bp, synthetic construct
  source 1..20: mol_type = other DNA
ggttcggcatggtcccgtgc

SEQ ID NO: 7342 - DNA, 21 bp, synthetic construct
  source 1..21: mol_type = other DNA
ggttcggcatggtcccgtgct

SEQ ID NO: 7343 - DNA, 20 bp, synthetic construct
  source 1..20: mol_type = other DNA
ggttgaggatcctggaatta

SEQ ID NO: 7344 - DNA, 20 bp, synthetic construct
  source 1..20: mol_type = other DNA
ggttgcgtcagcaaacactt

SEQ ID NO: 7345 - DNA, 20 bp, synthetic construct
  source 1..20: mol_type = other DNA
ggttggggactgcgaatttt

SEQ ID NO: 7346 - DNA, 20 bp, synthetic construct
  source 1..20: mol_type = other DNA
ggtttaatacccttatccaa

SEQ ID NO: 7347 - DNA, 20 bp, synthetic construct
  source 1..20: mol_type = other DNA
ggtttactgctcctgaactg

SEQ ID NO: 7348 - DNA, 20 bp, synthetic construct
  source 1..20: mol_type = other DNA
ggtttcaccccaccgcacgg

SEQ ID NO: 7349 - DNA, 20 bp, synthetic construct
  source 1..20: mol_type = other DNA
ggtttggtacagcaacagga

SEQ ID NO: 7350 - DNA, 20 bp, synthetic construct
  source 1..20: mol_type = other DNA
ggttttatccaaaggttacc

SEQ ID NO: 7351 - DNA, 20 bp, synthetic construct
  source 1..20: mol_type = other DNA
gtaaacaaaggacgtcccgc

SEQ ID NO: 7352 - DNA, 21 bp, synthetic construct
  source 1..21: mol_type = other DNA
gtaaacaaaggacgtcccgcg

SEQ ID NO: 7353 - DNA, 20 bp, synthetic construct
  source 1..20: mol_type = other DNA
gtaaaccctgttccgactac

SEQ ID NO: 7354 - DNA, 20 bp, synthetic construct
  source 1..20: mol_type = other DNA
gtaaactgagccaggagaaa

SEQ ID NO: 7355 - DNA, 20 bp, synthetic construct
  source 1..20: mol_type = other DNA
gtaaagagaggtgcgccccg

SEQ ID NO: 7356 - DNA, 20 bp, synthetic construct
  source 1..20: mol_type = other DNA
gtaaatagtgtctagtttgg

SEQ ID NO: 7357 - DNA, 21 bp, synthetic construct
  source 1..21: mol_type = other DNA
gtaaatagtgtctagtttgga

SEQ ID NO: 7358 - DNA, 20 bp, synthetic construct
  source 1..20: mol_type = other DNA
gtaaatatttggtaaccttt

SEQ ID NO: 7359 - DNA, 20 bp, synthetic construct
  source 1..20: mol_type = other DNA
gtaaatggggcagcaaaacc

SEQ ID NO: 7360 - DNA, 20 bp, synthetic construct
  source 1..20: mol_type = other DNA
gtaacacgagaaggggtcct

SEQ ID NO: 7361 - DNA, 20 bp, synthetic construct
  source 1..20: mol_type = other DNA
gtaacctttggataaaacct

SEQ ID NO: 7362 - DNA, 20 bp, synthetic construct
  source 1..20: mol_type = other DNA
gtaagaccttgggcaacatt

SEQ ID NO: 7363 - DNA, 20 bp, synthetic construct
  source 1..20: mol_type = other DNA
gtaagttggcgagaaagtga

SEQ ID NO: 7364 - DNA, 20 bp, synthetic construct
  source 1..20: mol_type = other DNA
gtacgagatcttctagatac

SEQ ID NO: 7365 - DNA, 20 bp, synthetic construct
  source 1..20: mol_type = other DNA
gtactaggaggctgtaggca

SEQ ID NO: 7366 - DNA, 20 bp, synthetic construct
  source 1..20: mol_type = other DNA
gtactgaaggaaagaagtca

SEQ ID NO: 7367 - DNA, 20 bp, synthetic construct
  source 1..20: mol_type = other DNA
gtagaagaataaagaccagt

SEQ ID NO: 7368 - DNA, 20 bp, synthetic construct
  source 1..20: mol_type = other DNA
gtagctccaaattctttata

SEQ ID NO: 7369 - DNA, 21 bp, synthetic construct
  source 1..21: mol_type = other DNA
gtaggagctggagcattcggg

SEQ ID NO: 7370 - DNA, 20 bp, synthetic construct
  source 1..20: mol_type = other DNA
gtaggcataaattggtctgc

SEQ ID NO: 7371 - DNA, 20 bp, synthetic construct
  source 1..20: mol_type = other DNA
gtaggcccacttacagttaa

SEQ ID NO: 7372 - DNA, 20 bp, synthetic construct
  source 1..20: mol_type = other DNA
gtagtatgccctgagcctga

SEQ ID NO: 7373 - DNA, 20 bp, synthetic construct
  source 1..20: mol_type = other DNA
gtagtcagttatgtcaacac

SEQ ID NO: 7374 - DNA, 20 bp, synthetic construct
  source 1..20: mol_type = other DNA
gtagtcatgcaggttcggca

SEQ ID NO: 7375 - DNA, 20 bp, synthetic construct
  source 1..20: mol_type = other DNA
gtagtcggaacagggtttac

SEQ ID NO: 7376 - DNA, 20 bp, synthetic construct
  source 1..20: mol_type = other DNA
gtagttccccctagaaaatt

SEQ ID NO: 7377 - DNA, 20 bp, synthetic construct
  source 1..20: mol_type = other DNA
gtagtttccggaagtgttga

SEQ ID NO: 7378 - DNA, 20 bp, synthetic construct
  source 1..20: mol_type = other DNA
gtatacatttaaaccctaac

SEQ ID NO: 7379 - DNA, 20 bp, synthetic construct
  source 1..20: mol_type = other DNA
gtatacccaaagacaaaaga

SEQ ID NO: 7380 - DNA, 20 bp, synthetic construct
  source 1..20: mol_type = other DNA
gtatctagaagatctcgtac

SEQ ID NO: 7381 - DNA, 20 bp, synthetic construct
  source 1..20: mol_type = other DNA
gtatgatgtgttcttgtggc

SEQ ID NO: 7382 - DNA, 20 bp, synthetic construct
  source 1..20: mol_type = other DNA
gtatgcatgtattcaatcta

SEQ ID NO: 7383 - DNA, 20 bp, synthetic construct
  source 1..20: mol_type = other DNA
gtatggatcggcagaggagc

SEQ ID NO: 7384 - DNA, 20 bp, synthetic construct
  source 1..20: mol_type = other DNA
gtattaaaccttattatcca

SEQ ID NO: 7385 - DNA, 20 bp, synthetic construct
  source 1..20: mol_type = other DNA
gtattcccatcccatcatcc

SEQ ID NO: 7386 - DNA, 21 bp, synthetic construct
  source 1..21: mol_type = other DNA
gtatttggtgtctttcggagt

SEQ ID NO: 7387 - DNA, 20 bp, synthetic construct
  source 1..20: mol_type = other DNA
gtcaacactaatatgggcct

SEQ ID NO: 7388 - DNA, 20 bp, synthetic construct
  source 1..20: mol_type = other DNA
gtcaatcttctcgaggattg

SEQ ID NO: 7389 - DNA, 20 bp, synthetic construct
  source 1..20: mol_type = other DNA
gtcaccatattcttgggaac

SEQ ID NO: 7390 - DNA, 20 bp, synthetic construct
  source 1..20: mol_type = other DNA
gtcattagttccccccagca

SEQ ID NO: 7391 - DNA, 20 bp, synthetic construct
  source 1..20: mol_type = other DNA
gtccaagagtcctcttatgt

SEQ ID NO: 7392 - DNA, 20 bp, synthetic construct
  source 1..20: mol_type = other DNA
gtccaaggaatactaacatt

SEQ ID NO: 7393 - DNA, 20 bp, synthetic construct
  source 1..20: mol_type = other DNA
tggacttctctcaattttct

SEQ ID NO: 7394 - DNA, 20 bp, synthetic construct
  source 1..20: mol_type = other DNA
gtccagaagaaccaacaaga

SEQ ID NO: 7395 - DNA, 20 bp, synthetic construct
  source 1..20: mol_type = other DNA
gtccatgccccaaagccacc

SEQ ID NO: 7396 - DNA, 20 bp, synthetic construct
  source 1..20: mol_type = other DNA
gtcccaagcgaccccgagaa

SEQ ID NO: 7397 - DNA, 20 bp, synthetic construct
  source 1..20: mol_type = other DNA
gtcccgataatgtttgctcc

SEQ ID NO: 7398 - DNA, 20 bp, synthetic construct
  source 1..20: mol_type = other DNA
gtcccgcgcaggatccagtt

SEQ ID NO: 7399 - DNA, 20 bp, synthetic construct
  source 1..20: mol_type = other DNA
gtcccgtcggcgctgaatcc

SEQ ID NO: 7400 - DNA, 20 bp, synthetic construct
  source 1..20: mol_type = other DNA
gtccggcagatgagaaggca

SEQ ID NO: 7401 - DNA, 20 bp, synthetic construct
  source 1..20: mol_type = other DNA
gtcctactgttcaagcctcc

SEQ ID NO: 7402 - DNA, 20 bp, synthetic construct
  source 1..20: mol_type = other DNA
gtcctcttatgtaagacctt

SEQ ID NO: 7403 - DNA, 20 bp, synthetic construct
  source 1..20: mol_type = other DNA
gtcctttgtttacgtcccgt

SEQ ID NO: 7404 - DNA, 20 bp, synthetic construct
  source 1..20: mol_type = other DNA
gtcgcagaagatctcaatct

SEQ ID NO: 7405 - DNA, 20 bp, synthetic construct
  source 1..20: mol_type = other DNA
gtcggaacggcagacggaga

SEQ ID NO: 7406 - DNA, 20 bp, synthetic construct
  source 1..20: mol_type = other DNA
gtcggtcggaacggcagacg

SEQ ID NO: 7407 - DNA, 20 bp, synthetic construct
  source 1..20: mol_type = other DNA
gtcggtcgttgacattgcag

SEQ ID NO: 7408 - DNA, 20 bp, synthetic construct
  source 1..20: mol_type = other DNA
gtctaacaacagtagtttcc

SEQ ID NO: 7409 - DNA, 20 bp, synthetic construct
  source 1..20: mol_type = other DNA
gtctagactctgcggtattg

SEQ ID NO: 7410 - DNA, 21 bp, synthetic construct
  source 1..21: mol_type = other DNA
gtctagactctgcggtattgt

SEQ ID NO: 7411 - DNA, 20 bp, synthetic construct
  source 1..20: mol_type = other DNA
gtctataagctggaggagtg

SEQ ID NO: 7412 - DNA, 20 bp, synthetic construct
  source 1..20: mol_type = other DNA
gtctcaatcgccgcgtcgca

SEQ ID NO: 7413 - DNA, 20 bp, synthetic construct
  source 1..20: mol_type = other DNA
gtctgcgcaccagcaccatg

SEQ ID NO: 7414 - DNA, 20 bp, synthetic construct
  source 1..20: mol_type = other DNA
gtctggagcaaacattatcg

SEQ ID NO: 7415 - DNA, 20 bp, synthetic construct
  source 1..20: mol_type = other DNA
gtctggccaggtgtccttgt

SEQ ID NO: 7416 - DNA, 20 bp, synthetic construct
  source 1..20: mol_type = other DNA
gtctggcgattggtggaggc

SEQ ID NO: 7417 - DNA, 20 bp, synthetic construct
  source 1..20: mol_type = other DNA
gtctgtgccttctcatctgc

SEQ ID NO: 7418 - DNA, 20 bp, synthetic construct
  source 1..20: mol_type = other DNA
gtcttacataagaggactct

SEQ ID NO: 7419 - DNA, 20 bp, synthetic construct
  source 1..20: mol_type = other DNA
gtcttggtgtaaatgtatat

SEQ ID NO: 7420 - DNA, 20 bp, synthetic construct
  source 1..20: mol_type = other DNA
gtctttaaacaaacagtctt

SEQ ID NO: 7421 - DNA, 21 bp, synthetic construct
  source 1..21: mol_type = other DNA
gtctttgaagtatgcctcaag

SEQ ID NO: 7422 - DNA, 20 bp, synthetic construct
  source 1..20: mol_type = other DNA
gtctttgtactaggaggctg

SEQ ID NO: 7423 - DNA, 20 bp, synthetic construct
  source 1..20: mol_type = other DNA
gtgaaaaagttgcatggtgc

SEQ ID NO: 7424 - DNA, 20 bp, synthetic construct
  source 1..20: mol_type = other DNA
gtgaaaccacaagagttgcc

SEQ ID NO: 7425 - DNA, 20 bp, synthetic construct
  source 1..20: mol_type = other DNA
gtgagaggcctgtatttccc

SEQ ID NO: 7426 - DNA, 21 bp, synthetic construct
  source 1..21: mol_type = other DNA
gtgagaggcctgtatttccct

SEQ ID NO: 7427 - DNA, 20 bp, synthetic construct
  source 1..20: mol_type = other DNA
gtgaggattcttgtcaacaa

SEQ ID NO: 7428 - DNA, 20 bp, synthetic construct
  source 1..20: mol_type = other DNA
gtgaggtgaacaatgctcag

SEQ ID NO: 7429 - DNA, 20 bp, synthetic construct
  source 1..20: mol_type = other DNA
gtgatgttctccatgttcag

SEQ ID NO: 7430 - DNA, 20 bp, synthetic construct
  source 1..20: mol_type = other DNA
gtgcacacggtccggcagat

SEQ ID NO: 7431 - DNA, 20 bp, synthetic construct
  source 1..20: mol_type = other DNA
gtgcagtatggtgaggtgaa

SEQ ID NO: 7432 - DNA, 20 bp, synthetic construct
  source 1..20: mol_type = other DNA
gtgccaagtgtttgctgacg

SEQ ID NO: 7433 - DNA, 20 bp, synthetic construct
  source 1..20: mol_type = other DNA
gtgcgaatccacactccgaa

SEQ ID NO: 7434 - DNA, 20 bp, synthetic construct
  source 1..20: mol_type = other DNA
gtgcgccccgtggtcggtcg

SEQ ID NO: 7435 - DNA, 20 bp, synthetic construct
  source 1..20: mol_type = other DNA
gtgctgccaactggatcctg

SEQ ID NO: 7436 - DNA, 20 bp, synthetic construct
  source 1..20: mol_type = other DNA
gtgctggtggttgaggatcc

SEQ ID NO: 7437 - DNA, 20 bp, synthetic construct
  source 1..20: mol_type = other DNA
gtggacttctctcaattttc

SEQ ID NO: 7438 - DNA, 20 bp, synthetic construct
  source 1..20: mol_type = other DNA
gtggagacagcggggtaggc

SEQ ID NO: 7439 - DNA, 20 bp, synthetic construct
  source 1..20: mol_type = other DNA
gtggaggcaggaggcggatt

SEQ ID NO: 7440 - DNA, 20 bp, synthetic construct
  source 1..20: mol_type = other DNA
gtgggtcaccatattcttgg

SEQ ID NO: 7441 - DNA, 20 bp, synthetic construct
  source 1..20: mol_type = other DNA
gtgggtcttttgggttttgc

SEQ ID NO: 7442 - DNA, 20 bp, synthetic construct
  source 1..20: mol_type = other DNA
gtggtcgggaaagaatccca

SEQ ID NO: 7443 - DNA, 20 bp, synthetic construct
  source 1..20: mol_type = other DNA
gtggtctccatgcgacgtgc

SEQ ID NO: 7444 - DNA, 20 bp, synthetic construct
  source 1..20: mol_type = other DNA
gtggttgaggatcctggaat

SEQ ID NO: 7445 - DNA, 20 bp, synthetic construct
  source 1..20: mol_type = other DNA
gtgtaaatagtgtctagttt

SEQ ID NO: 7446 - DNA, 20 bp, synthetic construct
  source 1..20: mol_type = other DNA
gtgtaaatgtatattaggaa

SEQ ID NO: 7447 - DNA, 20 bp, synthetic construct
  source 1..20: mol_type = other DNA
gtgtggattcgcactcctcc

SEQ ID NO: 7448 - DNA, 20 bp, synthetic construct
  source 1..20: mol_type = other DNA
gtgttgacataactgactac

SEQ ID NO: 7449 - DNA, 20 bp, synthetic construct
  source 1..20: mol_type = other DNA
gtgtttctcaaaggtggaga

SEQ ID NO: 7450 - DNA, 20 bp, synthetic construct
  source 1..20: mol_type = other DNA
gtgttttccaatgaggatta

SEQ ID NO: 7451 - DNA, 20 bp, synthetic construct
  source 1..20: mol_type = other DNA
gttaatcattacttccaaac

SEQ ID NO: 7452 - DNA, 20 bp, synthetic construct
  source 1..20: mol_type = other DNA
gttaccaaatatttaccatt

SEQ ID NO: 7453 - DNA, 21 bp, synthetic construct
  source 1..21: mol_type = other DNA
gttaccaattttcttttgtct

SEQ ID NO: 7454 - DNA, 20 bp, synthetic construct
  source 1..20: mol_type = other DNA
gttagtattccttggactca

SEQ ID NO: 7455 - DNA, 20 bp, synthetic construct
  source 1..20: mol_type = other DNA
gttatcgctggatgtgtctg

SEQ ID NO: 7456 - DNA, 20 bp, synthetic construct
  source 1..20: mol_type = other DNA
gttatgggtccttgccacaa

SEQ ID NO: 7457 - DNA, 20 bp, synthetic construct
  source 1..20: mol_type = other DNA
gttatgtcaacactaatatg

SEQ ID NO: 7458 - DNA, 20 bp, synthetic construct
  source 1..20: mol_type = other DNA
gttatgtcattggaagttat

SEQ ID NO: 7459 - DNA, 21 bp, synthetic construct
  source 1..21: mol_type = other DNA
gttcacattttttgataatgt

SEQ ID NO: 7460 - DNA, 20 bp, synthetic construct
  source 1..20: mol_type = other DNA
gttcaggtattgtttacaca

SEQ ID NO: 7461 - DNA, 20 bp, synthetic construct
  source 1..20: mol_type = other DNA
gttccccaccttatgagtcc

SEQ ID NO: 7462 - DNA, 21 bp, synthetic construct
  source 1..21: mol_type = other DNA
gttccccaccttatgagtcca

SEQ ID NO: 7463 - DNA, 20 bp, synthetic construct
  source 1..20: mol_type = other DNA
gttccccctagaaaattgag

SEQ ID NO: 7464 - DNA, 20 bp, synthetic construct
  source 1..20: mol_type = other DNA
aggagttccgcagtatggat

SEQ ID NO: 7465 - DNA, 20 bp, synthetic construct
  source 1..20: mol_type = other DNA
gttcttgtggcaaggaccca

SEQ ID NO: 7466 - DNA, 20 bp, synthetic construct
  source 1..20: mol_type = other DNA
gttgacattgcagagagtcc

SEQ ID NO: 7467 - DNA, 20 bp, synthetic construct
  source 1..20: mol_type = other DNA
gttgaggatcctggaattag

SEQ ID NO: 7468 - DNA, 20 bp, synthetic construct
  source 1..20: mol_type = other DNA
gttgataggataggggcatt

SEQ ID NO: 7469 - DNA, 21 bp, synthetic construct
  source 1..21: mol_type = other DNA
gttgataggataggggcattt

SEQ ID NO: 7470 - DNA, 20 bp, synthetic construct
  source 1..20: mol_type = other DNA
gttgcatggtgctggtgcgc

SEQ ID NO: 7471 - DNA, 20 bp, synthetic construct
  source 1..20: mol_type = other DNA
gttgcccaaggtcttacata

SEQ ID NO: 7472 - DNA, 20 bp, synthetic construct
  source 1..20: mol_type = other DNA
gttgccgggcaacggggtaa

SEQ ID NO: 7473 - DNA, 20 bp, synthetic construct
  source 1..20: mol_type = other DNA
gttggaggacaggaggttgg

SEQ ID NO: 7474 - DNA, 20 bp, synthetic construct
  source 1..20: mol_type = other DNA
gttggatccagccttcagag

SEQ ID NO: 7475 - DNA, 20 bp, synthetic construct
  source 1..20: mol_type = other DNA
gttgggggaggagattagat

SEQ ID NO: 7476 - DNA, 21 bp, synthetic construct
  source 1..21: mol_type = other DNA
gttgggggaggagattagatt

SEQ ID NO: 7477 - DNA, 20 bp, synthetic construct
  source 1..20: mol_type = other DNA
gttggtgagtgattggaggt

SEQ ID NO: 7478 - DNA, 20 bp, synthetic construct
  source 1..20: mol_type = other DNA
gttggttcttctggactatc

SEQ ID NO: 7479 - DNA, 20 bp, synthetic construct
  source 1..20: mol_type = other DNA
gtttaaagactgggaggagt

SEQ ID NO: 7480 - DNA, 21 bp, synthetic construct
  source 1..21: mol_type = other DNA
gtttaatacccttatccaatg

SEQ ID NO: 7481 - DNA, 20 bp, synthetic construct
  source 1..20: mol_type = other DNA
gtttacacagaaaggccttg

SEQ ID NO: 7482 - DNA, 20 bp, synthetic construct
  source 1..20: mol_type = other DNA
gtttacgtcccgtcggcgct

SEQ ID NO: 7483 - DNA, 20 bp, synthetic construct
  source 1..20: mol_type = other DNA
gtttactagtgccatttgtt

SEQ ID NO: 7484 - DNA, 21 bp, synthetic construct
  source 1..21: mol_type = other DNA
gtttactagtgccatttgttc

SEQ ID NO: 7485 - DNA, 20 bp, synthetic construct
  source 1..20: mol_type = other DNA
gtttactgctcctgaactgg

SEQ ID NO: 7486 - DNA, 20 bp, synthetic construct
  source 1..20: mol_type = other DNA
gtttcaccccaccgcacgga

SEQ ID NO: 7487 - DNA, 21 bp, synthetic construct
  source 1..21: mol_type = other DNA
gtttctcaaaggtggagacag

SEQ ID NO: 7488 - DNA, 20 bp, synthetic construct
  source 1..20: mol_type = other DNA
gtttgctccagacctgctgc

SEQ ID NO: 7489 - DNA, 20 bp, synthetic construct
  source 1..20: mol_type = other DNA
gtttggaagtaatgattaac

SEQ ID NO: 7490 - DNA, 20 bp, synthetic construct
  source 1..20: mol_type = other DNA
gtttggtacagcaacaggag

SEQ ID NO: 7491 - DNA, 20 bp, synthetic construct
  source 1..20: mol_type = other DNA
gtttgtttaaagactgggag

SEQ ID NO: 7492 - DNA, 21 bp, synthetic construct
  source 1..21: mol_type = other DNA
gttttccaatgaggattaaag

SEQ ID NO: 7493 - DNA, 20 bp, synthetic construct
  source 1..20: mol_type = other DNA
gttttgctcgcagcaggtct

SEQ ID NO: 7494 - DNA, 20 bp, synthetic construct
  source 1..20: mol_type = other DNA
gttttgctgccccatttaca

SEQ ID NO: 7495 - DNA, 20 bp, synthetic construct
  source 1..20: mol_type = other DNA
taaaacctagcaggcataat

SEQ ID NO: 7496 - DNA, 20 bp, synthetic construct
  source 1..20: mol_type = other DNA
taaaacgccgcagacacatc

SEQ ID NO: 7497 - DNA, 20 bp, synthetic construct
  source 1..20: mol_type = other DNA
ccgcagtatggatcggcaga

SEQ ID NO: 7498 - DNA, 20 bp, synthetic construct
  source 1..20: mol_type = other DNA
taaacaaaggacgtcccgcg

SEQ ID NO: 7499 - DNA, 20 bp, synthetic construct
  source 1..20: mol_type = other DNA
taaaccctaacaaaacaaag

SEQ ID NO: 7500 - DNA, 21 bp, synthetic construct
  source 1..21: mol_type = other DNA
taaaccttattatccagaaca

SEQ ID NO: 7501 - DNA, 20 bp, synthetic construct
  source 1..20: mol_type = other DNA
taaactgagccaggagaaac

SEQ ID NO: 7502 - DNA, 20 bp, synthetic construct
  source 1..20: mol_type = other DNA
taaagaatttggagctactg

SEQ ID NO: 7503 - DNA, 20 bp, synthetic construct
  source 1..20: mol_type = other DNA
taaagacaggtacagtagaa

SEQ ID NO: 7504 - DNA, 20 bp, synthetic construct
  source 1..20: mol_type = other DNA
taaagactgggaggagttgg

SEQ ID NO: 7505 - DNA, 21 bp, synthetic construct
  source 1..21: mol_type = other DNA
taaagagaggtgcgccccgtg

SEQ ID NO: 7506 - DNA, 20 bp, synthetic construct
  source 1..20: mol_type = other DNA
taaaggtctttgtactagga

SEQ ID NO: 7507 - DNA, 20 bp, synthetic construct
  source 1..20: mol_type = other DNA
taaagttcaggcaactcttg

SEQ ID NO: 7508 - DNA, 20 bp, synthetic construct
  source 1..20: mol_type = other DNA
taaatggggcagcaaaaccc

SEQ ID NO: 7509 - DNA, 20 bp, synthetic construct
  source 1..20: mol_type = other DNA
taaatgtatacccaaagaca

SEQ ID NO: 7510 - DNA, 20 bp, synthetic construct
  source 1..20: mol_type = other DNA
taacacccacccaggtagct

SEQ ID NO: 7511 - DNA, 20 bp, synthetic construct
  source 1..20: mol_type = other DNA
taacacgagaaggggtccta

SEQ ID NO: 7512 - DNA, 21 bp, synthetic construct
  source 1..21: mol_type = other DNA
taacagcggtaaaaagggact

SEQ ID NO: 7513 - DNA, 20 bp, synthetic construct
  source 1..20: mol_type = other DNA
taacaggcctattgattgga

SEQ ID NO: 7514 - DNA, 21 bp, synthetic construct
  source 1..21: mol_type = other DNA
taacattgaggttcccgagat

SEQ ID NO: 7515 - DNA, 20 bp, synthetic construct
  source 1..20: mol_type = other DNA
taaccacattgtgtaaatgg

SEQ ID NO: 7516 - DNA, 20 bp, synthetic construct
  source 1..20: mol_type = other DNA
taaccaggacaagttggagg

SEQ ID NO: 7517 - DNA, 20 bp, synthetic construct
  source 1..20: mol_type = other DNA
taactagatgttctggataa

SEQ ID NO: 7518 - DNA, 20 bp, synthetic construct
  source 1..20: mol_type = other DNA
taactgaaagccaaacagtg

SEQ ID NO: 7519 - DNA, 20 bp, synthetic construct
  source 1..20: mol_type = other DNA
taactgactactaggtctct

SEQ ID NO: 7520 - DNA, 21 bp, synthetic construct
  source 1..21: mol_type = other DNA
taagaggactcttggactctc

SEQ ID NO: 7521 - DNA, 20 bp, synthetic construct
  source 1..20: mol_type = other DNA
taagcaggctttcactttct

SEQ ID NO: 7522 - DNA, 20 bp, synthetic construct
  source 1..20: mol_type = other DNA
taagggagaggcagtagtcg

SEQ ID NO: 7523 - DNA, 20 bp, synthetic construct
  source 1..20: mol_type = other DNA
taaggtttaatacccttatc

SEQ ID NO: 7524 - DNA, 21 bp, synthetic construct
  source 1..21: mol_type = other DNA
taaggtttaatacccttatcc

SEQ ID NO: 7525 - DNA, 20 bp, synthetic construct
  source 1..20: mol_type = other DNA
taagttggcgagaaagtgaa

SEQ ID NO: 7526 - DNA, 21 bp, synthetic construct
  source 1..21: mol_type = other DNA
taataaggtttaataccctta

SEQ ID NO: 7527 - DNA, 20 bp, synthetic construct
  source 1..20: mol_type = other DNA
taatacccttatccaatggt

SEQ ID NO: 7528 - DNA, 20 bp, synthetic construct
  source 1..20: mol_type = other DNA
taatatacccgccttccata

SEQ ID NO: 7529 - DNA, 20 bp, synthetic construct
  source 1..20: mol_type = other DNA
taatatgggcctaaagttca

SEQ ID NO: 7530 - DNA, 21 bp, synthetic construct
  source 1..21: mol_type = other DNA
taatctcctcccccaactcct

SEQ ID NO: 7531 - DNA, 21 bp, synthetic construct
  source 1..21: mol_type = other DNA
taatgagaaaagaagattgca

SEQ ID NO: 7532 - DNA, 20 bp, synthetic construct
  source 1..20: mol_type = other DNA
taatgattaactagatgttc

SEQ ID NO: 7533 - DNA, 21 bp, synthetic construct
  source 1..21: mol_type = other DNA
taatgcccttgtatgcatgta

SEQ ID NO: 7534 - DNA, 20 bp, synthetic construct
  source 1..20: mol_type = other DNA
tacaaactgttcacattttt

SEQ ID NO: 7535 - DNA, 21 bp, synthetic construct
  source 1..21: mol_type = other DNA
tacaaactgttcacatttttt

SEQ ID NO: 7536 - DNA, 21 bp, synthetic construct
  source 1..21: mol_type = other DNA
tacacaatgtggttatcctgc

SEQ ID NO: 7537 - DNA, 20 bp, synthetic construct
  source 1..20: mol_type = other DNA
tacaccaagacattatcaaa

SEQ ID NO: 7538 - DNA, 20 bp, synthetic construct
  source 1..20: mol_type = other DNA
tacagagctgaggcggtatc

SEQ ID NO: 7539 - DNA, 20 bp, synthetic construct
  source 1..20: mol_type = other DNA
tacaggtgcaatttccgtcc

SEQ ID NO: 7540 - DNA, 20 bp, synthetic construct
  source 1..20: mol_type = other DNA
tacagtagaagaataaagac

SEQ ID NO: 7541 - DNA, 20 bp, synthetic construct
  source 1..20: mol_type = other DNA
tacatcgtatccatggctgc

SEQ ID NO: 7542 - DNA, 20 bp, synthetic construct
  source 1..20: mol_type = other DNA
taccaattttcttttgtctt

SEQ ID NO: 7543 - DNA, 20 bp, synthetic construct
  source 1..20: mol_type = other DNA
taccacatcatccatataac

SEQ ID NO: 7544 - DNA, 20 bp, synthetic construct
  source 1..20: mol_type = other DNA
taccattggataagggtatt

SEQ ID NO: 7545 - DNA, 20 bp, synthetic construct
  source 1..20: mol_type = other DNA
taccccgctgtctccacctt

SEQ ID NO: 7546 - DNA, 21 bp, synthetic construct
  source 1..21: mol_type = other DNA
taccccgttgcccggcaacgg

SEQ ID NO: 7547 - DNA, 21 bp, synthetic construct
  source 1..21: mol_type = other DNA
tacccgccttccatagagtgt

SEQ ID NO: 7548 - DNA, 20 bp, synthetic construct
  source 1..20: mol_type = other DNA
taccgcagagtctagactcg

SEQ ID NO: 7549 - DNA, 20 bp, synthetic construct
  source 1..20: mol_type = other DNA
taccgcctcagctctgtatc

SEQ ID NO: 7550 - DNA, 20 bp, synthetic construct
  source 1..20: mol_type = other DNA
tacctgaacctttaccccgt

SEQ ID NO: 7551 - DNA, 20 bp, synthetic construct
  source 1..20: mol_type = other DNA
tacctgggtgggtgttaatt

SEQ ID NO: 7552 - DNA, 20 bp, synthetic construct
  source 1..20: mol_type = other DNA
tacctgtctttaatcctcat

SEQ ID NO: 7553 - DNA, 20 bp, synthetic construct
  source 1..20: mol_type = other DNA
taccttgttggcgtctggcc

SEQ ID NO: 7554 - DNA, 20 bp, synthetic construct
  source 1..20: mol_type = other DNA
tacgatgtatatttgcggga

SEQ ID NO: 7555 - DNA, 20 bp, synthetic construct
  source 1..20: mol_type = other DNA
tactaacattgaggttcccg

SEQ ID NO: 7556 - DNA, 20 bp, synthetic construct
  source 1..20: mol_type = other DNA
tactaggaggctgtaggcat

SEQ ID NO: 7557 - DNA, 20 bp, synthetic construct
  source 1..20: mol_type = other DNA
tactagtgccatttgttcag

SEQ ID NO: 7558 - DNA, 20 bp, synthetic construct
  source 1..20: mol_type = other DNA
tactgaaggaaagaagtcag

SEQ ID NO: 7559 - DNA, 20 bp, synthetic construct
  source 1..20: mol_type = other DNA
tactgcctctcccttatcgt

SEQ ID NO: 7560 - DNA, 20 bp, synthetic construct
  source 1..20: mol_type = other DNA
tacttcaaagactgtttgtt

SEQ ID NO: 7561 - DNA, 21 bp, synthetic construct
  source 1..21: mol_type = other DNA
tactttccaatcaataggcct

SEQ ID NO: 7562 - DNA, 20 bp, synthetic construct
  source 1..20: mol_type = other DNA
tagaaaacttcctattaaca

SEQ ID NO: 7563 - DNA, 20 bp, synthetic construct
  source 1..20: mol_type = other DNA
tagaagaataaagaccagta

SEQ ID NO: 7564 - DNA, 20 bp, synthetic construct
  source 1..20: mol_type = other DNA
tagaagatctcgtactgaag

SEQ ID NO: 7565 - DNA, 20 bp, synthetic construct
  source 1..20: mol_type = other DNA
tagactctgcggtattgtga

SEQ ID NO: 7566 - DNA, 20 bp, synthetic construct
  source 1..20: mol_type = other DNA
tagagtatttggtgtctttc

SEQ ID NO: 7567 - DNA, 20 bp, synthetic construct
  source 1..20: mol_type = other DNA
tagagtcattagttcccccc

SEQ ID NO: 7568 - DNA, 20 bp, synthetic construct
  source 1..20: mol_type = other DNA
tagagtgtgtaaatagtgtc

SEQ ID NO: 7569 - DNA, 21 bp, synthetic construct
  source 1..21: mol_type = other DNA
tagatgttctggataataagg

SEQ ID NO: 7570 - DNA, 20 bp, synthetic construct
  source 1..20: mol_type = other DNA
tagattaaaggtctttgtac

SEQ ID NO: 7571 - DNA, 20 bp, synthetic construct
  source 1..20: mol_type = other DNA
tagattgaatacatgcatac

SEQ ID NO: 7572 - DNA, 20 bp, synthetic construct
  source 1..20: mol_type = other DNA
tagcagcaggatgaagagga

SEQ ID NO: 7573 - DNA, 21 bp, synthetic construct
  source 1..21: mol_type = other DNA
tagcagcaggatgaagaggaa

SEQ ID NO: 7574 - DNA, 20 bp, synthetic construct
  source 1..20: mol_type = other DNA
tagccgcttgttttgctcgc

SEQ ID NO: 7575 - DNA, 21 bp, synthetic construct
  source 1..21: mol_type = other DNA
tagccgcttgttttgctcgca

SEQ ID NO: 7576 - DNA, 20 bp, synthetic construct
  source 1..20: mol_type = other DNA
tagctccaaattctttataa

SEQ ID NO: 7577 - DNA, 20 bp, synthetic construct
  source 1..20: mol_type = other DNA
taggaaaagatggtgttttc

SEQ ID NO: 7578 - DNA, 20 bp, synthetic construct
  source 1..20: mol_type = other DNA
taggaattttccgaaagccc

SEQ ID NO: 7579 - DNA, 20 bp, synthetic construct
  source 1..20: mol_type = other DNA
taggaccccttctcgtgtta

SEQ ID NO: 7580 - DNA, 21 bp, synthetic construct
  source 1..21: mol_type = other DNA
taggcagaggtgaaaaagttg

SEQ ID NO: 7581 - DNA, 20 bp, synthetic construct
  source 1..20: mol_type = other DNA
taggcccacttacagttaat

SEQ ID NO: 7582 - DNA, 20 bp, synthetic construct
  source 1..20: mol_type = other DNA
taggctgccttcctgtctgg

SEQ ID NO: 7583 - DNA, 20 bp, synthetic construct
  source 1..20: mol_type = other DNA
tagggctttcccccactgtt

SEQ ID NO: 7584 - DNA, 20 bp, synthetic construct
  source 1..20: mol_type = other DNA
taggggcatttggtggtcta

SEQ ID NO: 7585 - DNA, 20 bp, synthetic construct
  source 1..20: mol_type = other DNA
tagggtttaaatgtataccc

SEQ ID NO: 7586 - DNA, 20 bp, synthetic construct
  source 1..20: mol_type = other DNA
tagtacaaagacctttaatc

SEQ ID NO: 7587 - DNA, 20 bp, synthetic construct
  source 1..20: mol_type = other DNA
tagtatgccctgagcctgag

SEQ ID NO: 7588 - DNA, 20 bp, synthetic construct
  source 1..20: mol_type = other DNA
tagtattccttggactcata

SEQ ID NO: 7589 - DNA, 20 bp, synthetic construct
  source 1..20: mol_type = other DNA
tagtccagaagaaccaacaa

SEQ ID NO: 7590 - DNA, 21 bp, synthetic construct
  source 1..21: mol_type = other DNA
tagtgttgacataactgacta

SEQ ID NO: 7591 - DNA, 20 bp, synthetic construct
  source 1..20: mol_type = other DNA
tagttccccctagaaaattg

SEQ ID NO: 7592 - DNA, 20 bp, synthetic construct
  source 1..20: mol_type = other DNA
tagtttccggaagtgttgat

SEQ ID NO: 7593 - DNA, 21 bp, synthetic construct
  source 1..21: mol_type = other DNA
tagtttggaagtaatgattaa

SEQ ID NO: 7594 - DNA, 20 bp, synthetic construct
  source 1..20: mol_type = other DNA
tataacggtttctcttccaa

SEQ ID NO: 7595 - DNA, 20 bp, synthetic construct
  source 1..20: mol_type = other DNA
tataactgaaagccaaacag

SEQ ID NO: 7596 - DNA, 20 bp, synthetic construct
  source 1..20: mol_type = other DNA
tataagagagaaacaacaca

SEQ ID NO: 7597 - DNA, 20 bp, synthetic construct
  source 1..20: mol_type = other DNA
tataatatacccgccttcca

SEQ ID NO: 7598 - DNA, 20 bp, synthetic construct
  source 1..20: mol_type = other DNA
tatacatttaaaccctaaca

SEQ ID NO: 7599 - DNA, 21 bp, synthetic construct
  source 1..21: mol_type = other DNA
tatacccaaagacaaaagaaa

SEQ ID NO: 7600 - DNA, 21 bp, synthetic construct
  source 1..21: mol_type = other DNA
tatagagtatttggtgtcttt

SEQ ID NO: 7601 - DNA, 20 bp, synthetic construct
  source 1..20: mol_type = other DNA
tatatggatgatgtggtatt

SEQ ID NO: 7602 - DNA, 20 bp, synthetic construct
  source 1..20: mol_type = other DNA
tatattatataagagagaaa

SEQ ID NO: 7603 - DNA, 21 bp, synthetic construct
  source 1..21: mol_type = other DNA
tatatttgcgggagaggacaa

SEQ ID NO: 7604 - DNA, 20 bp, synthetic construct
  source 1..20: mol_type = other DNA
tatcatcttcctcttcatcc

SEQ ID NO: 7605 - DNA, 20 bp, synthetic construct
  source 1..20: mol_type = other DNA
tatccatggctgctaggctg

SEQ ID NO: 7606 - DNA, 20 bp, synthetic construct
  source 1..20: mol_type = other DNA
tatccctcctgttgctgtac

SEQ ID NO: 7607 - DNA, 20 bp, synthetic construct
  source 1..20: mol_type = other DNA
tatcctatcaacacttccgg

SEQ ID NO: 7608 - DNA, 20 bp, synthetic construct
  source 1..20: mol_type = other DNA
tatctagaagatctcgtact

SEQ ID NO: 7609 - DNA, 20 bp, synthetic construct
  source 1..20: mol_type = other DNA
tatgatgtgttcttgtggca

SEQ ID NO: 7610 - DNA, 20 bp, synthetic construct
  source 1..20: mol_type = other DNA
tatgcctcaaggtcggtcgt

SEQ ID NO: 7611 - DNA, 20 bp, synthetic construct
  source 1..20: mol_type = other DNA
tatgcctgctaggttttatc

SEQ ID NO: 7612 - DNA, 21 bp, synthetic construct
  source 1..21: mol_type = other DNA
tatgcctgctaggttttatcc

SEQ ID NO: 7613 - DNA, 20 bp, synthetic construct
  source 1..20: mol_type = other DNA
tatggatcggcagaggagcc

SEQ ID NO: 7614 - DNA, 20 bp, synthetic construct
  source 1..20: mol_type = other DNA
tatggatgatgtggtattgg

SEQ ID NO: 7615 - DNA, 20 bp, synthetic construct
  source 1..20: mol_type = other DNA
tatggtgacccacaaaatga

SEQ ID NO: 7616 - DNA, 20 bp, synthetic construct
  source 1..20: mol_type = other DNA
tatggtgaggtgaacaatgc

SEQ ID NO: 7617 - DNA, 21 bp, synthetic construct
  source 1..21: mol_type = other DNA
tatgtaagaccttgggcaaca

SEQ ID NO: 7618 - DNA, 20 bp, synthetic construct
  source 1..20: mol_type = other DNA
tatgtatccctcctgttgct

SEQ ID NO: 7619 - DNA, 20 bp, synthetic construct
  source 1..20: mol_type = other DNA
tatgttgcccgtttgtcctc

SEQ ID NO: 7620 - DNA, 20 bp, synthetic construct
  source 1..20: mol_type = other DNA
tattaacaggcctattgatt

SEQ ID NO: 7621 - DNA, 21 bp, synthetic construct
  source 1..21: mol_type = other DNA
tattaacaggcctattgattg

SEQ ID NO: 7622 - DNA, 21 bp, synthetic construct
  source 1..21: mol_type = other DNA
tattaggaaaagatggtgttt

SEQ ID NO: 7623 - DNA, 20 bp, synthetic construct
  source 1..20: mol_type = other DNA
tattatccagaacatctagt

SEQ ID NO: 7624 - DNA, 20 bp, synthetic construct
  source 1..20: mol_type = other DNA
tattcccatcccatcatcct

SEQ ID NO: 7625 - DNA, 20 bp, synthetic construct
  source 1..20: mol_type = other DNA
tattccttggactcataagg

SEQ ID NO: 7626 - DNA, 21 bp, synthetic construct
  source 1..21: mol_type = other DNA
tattcttctactgtacctgtc

SEQ ID NO: 7627 - DNA, 21 bp, synthetic construct
  source 1..21: mol_type = other DNA
tattgattggaaagtatgtca

SEQ ID NO: 7628 - DNA, 20 bp, synthetic construct
  source 1..20: mol_type = other DNA
tattgggggccaagtctgta

SEQ ID NO: 7629 - DNA, 20 bp, synthetic construct
  source 1..20: mol_type = other DNA
tatttacacactctatggaa

SEQ ID NO: 7630 - DNA, 21 bp, synthetic construct
  source 1..21: mol_type = other DNA
tatttacacactctatggaag

SEQ ID NO: 7631 - DNA, 20 bp, synthetic construct
  source 1..20: mol_type = other DNA
tatttccctgctggtggctc

SEQ ID NO: 7632 - DNA, 20 bp, synthetic construct
  source 1..20: mol_type = other DNA
tatttgcgggagaggacaac

SEQ ID NO: 7633 - DNA, 20 bp, synthetic construct
  source 1..20: mol_type = other DNA
tatttggtaacctttggata

SEQ ID NO: 7634 - DNA, 20 bp, synthetic construct
  source 1..20: mol_type = other DNA
tcaacactaatatgggccta

SEQ ID NO: 7635 - DNA, 20 bp, synthetic construct
  source 1..20: mol_type = other DNA
tcaacgaattgtgggtcttt

SEQ ID NO: 7636 - DNA, 20 bp, synthetic construct
  source 1..20: mol_type = other DNA
tcaagatgctgtacagactt

SEQ ID NO: 7637 - DNA, 20 bp, synthetic construct
  source 1..20: mol_type = other DNA
tcaaggtcggtcgttgacat

SEQ ID NO: 7638 - DNA, 20 bp, synthetic construct
  source 1..20: mol_type = other DNA
tcaataggcctgttaatagg

SEQ ID NO: 7639 - DNA, 20 bp, synthetic construct
  source 1..20: mol_type = other DNA
tcaatcccaacaaggacacc

SEQ ID NO: 7640 - DNA, 20 bp, synthetic construct
  source 1..20: mol_type = other DNA
tcaatcttctcgaggattgg

SEQ ID NO: 7641 - DNA, 21 bp, synthetic construct
  source 1..21: mol_type = other DNA
tcaccaaactctgcaagatcc

SEQ ID NO: 7642 - DNA, 20 bp, synthetic construct
  source 1..20: mol_type = other DNA
tcaccatactgcactcaggc

SEQ ID NO: 7643 - DNA, 21 bp, synthetic construct
  source 1..21: mol_type = other DNA
tcaccatactgcactcaggca

SEQ ID NO: 7644 - DNA, 20 bp, synthetic construct
  source 1..20: mol_type = other DNA
tcaccatattcttgggaaca

SEQ ID NO: 7645 - DNA, 20 bp, synthetic construct
  source 1..20: mol_type = other DNA
tcacctcaccatactgcact

SEQ ID NO: 7646 - DNA, 20 bp, synthetic construct
  source 1..20: mol_type = other DNA
tcacctctgcacgtcgcatg

SEQ ID NO: 7647 - DNA, 21 bp, synthetic construct
  source 1..21: mol_type = other DNA
tcactctgggatcttgcagag

SEQ ID NO: 7648 - DNA, 20 bp, synthetic construct
  source 1..20: mol_type = other DNA
tcactttctcgccaacttac

SEQ ID NO: 7649 - DNA, 20 bp, synthetic construct
  source 1..20: mol_type = other DNA
tcagaaggcaaaaacgagag

SEQ ID NO: 7650 - DNA, 20 bp, synthetic construct
  source 1..20: mol_type = other DNA
tcagcccgtttctcctggct

SEQ ID NO: 7651 - DNA, 20 bp, synthetic construct
  source 1..20: mol_type = other DNA
tcaggcaagcaattctttgc

SEQ ID NO: 7652 - DNA, 20 bp, synthetic construct
  source 1..20: mol_type = other DNA
tcaggctcagggcatactac

SEQ ID NO: 7653 - DNA, 20 bp, synthetic construct
  source 1..20: mol_type = other DNA
tcagggcatactacaaactt

SEQ ID NO: 7654 - DNA, 20 bp, synthetic construct
  source 1..20: mol_type = other DNA
tcaggtattgtttacacaga

SEQ ID NO: 7655 - DNA, 21 bp, synthetic construct
  source 1..21: mol_type = other DNA
tcagtttactagtgccatttg

SEQ ID NO: 7656 - DNA, 20 bp, synthetic construct
  source 1..20: mol_type = other DNA
tcatccatataactgaaagc

SEQ ID NO: 7657 - DNA, 20 bp, synthetic construct
  source 1..20: mol_type = other DNA
tcattagttccccccagcaa

SEQ ID NO: 7658 - DNA, 20 bp, synthetic construct
  source 1..20: mol_type = other DNA
tccaaattctttataagggt

SEQ ID NO: 7659 - DNA, 20 bp, synthetic construct
  source 1..20: mol_type = other DNA
tccaactggtggtcgggaaa

SEQ ID NO: 7660 - DNA, 21 bp, synthetic construct
  source 1..21: mol_type = other DNA
tccaacttgtcctggttatcg

SEQ ID NO: 7661 - DNA, 20 bp, synthetic construct
  source 1..20: mol_type = other DNA
tccaagagtcctcttatgta

SEQ ID NO: 7662 - DNA, 20 bp, synthetic construct
  source 1..20: mol_type = other DNA
tccaaggaatactaacattg

SEQ ID NO: 7663 - DNA, 20 bp, synthetic construct
  source 1..20: mol_type = other DNA
tccaatcaataggcctgtta

SEQ ID NO: 7664 - DNA, 20 bp, synthetic construct
  source 1..20: mol_type = other DNA
tccacactccgaaagacacc

SEQ ID NO: 7665 - DNA, 20 bp, synthetic construct
  source 1..20: mol_type = other DNA
tccaccaatcgccagacagg

SEQ ID NO: 7666 - DNA, 20 bp, synthetic construct
  source 1..20: mol_type = other DNA
tccaccacgagtctagactc

SEQ ID NO: 7667 - DNA, 20 bp, synthetic construct
  source 1..20: mol_type = other DNA
tccaccccaaaaggcctccg

SEQ ID NO: 7668 - DNA, 20 bp, synthetic construct
  source 1..20: mol_type = other DNA
tccagcatctagagacctag

SEQ ID NO: 7669 - DNA, 20 bp, synthetic construct
  source 1..20: mol_type = other DNA
tccagccttcagagcaaaca

SEQ ID NO: 7670 - DNA, 20 bp, synthetic construct
  source 1..20: mol_type = other DNA
tccagttggcagcacagcct

SEQ ID NO: 7671 - DNA, 20 bp, synthetic construct
  source 1..20: mol_type = other DNA
tccatgccccaaagccaccc

SEQ ID NO: 7672 - DNA, 20 bp, synthetic construct
  source 1..20: mol_type = other DNA
tccatgcgacgtgcagaggt

SEQ ID NO: 7673 - DNA, 20 bp, synthetic construct
  source 1..20: mol_type = other DNA
tcccaacaaggacacctggc

SEQ ID NO: 7674 - DNA, 21 bp, synthetic construct
  source 1..21: mol_type = other DNA
tcccaagaatatggtgaccca

SEQ ID NO: 7675 - DNA, 20 bp, synthetic construct
  source 1..20: mol_type = other DNA
tcccagaggattgctggtgg

SEQ ID NO: 7676 - DNA, 20 bp, synthetic construct
  source 1..20: mol_type = other DNA
tcccataggaattttccgaa

SEQ ID NO: 7677 - DNA, 20 bp, synthetic construct
  source 1..20: mol_type = other DNA
tcccatcatcctgggctttc

SEQ ID NO: 7678 - DNA, 21 bp, synthetic construct
  source 1..21: mol_type = other DNA
tcccatcatcctgggctttcg

SEQ ID NO: 7679 - DNA, 20 bp, synthetic construct
  source 1..20: mol_type = other DNA
tccccaatcctcgagaagat

SEQ ID NO: 7680 - DNA, 21 bp, synthetic construct
  source 1..21: mol_type = other DNA
tccccaatcctcgagaagatt

SEQ ID NO: 7681 - DNA, 20 bp, synthetic construct
  source 1..20: mol_type = other DNA
tccccaccttatgagtccaa

SEQ ID NO: 7682 - DNA, 20 bp, synthetic construct
  source 1..20: mol_type = other DNA
tccccctagaaaattgagag

SEQ ID NO: 7683 - DNA, 20 bp, synthetic construct
  source 1..20: mol_type = other DNA
tcccgaccaccagttggatc

SEQ ID NO: 7684 - DNA, 20 bp, synthetic construct
  source 1..20: mol_type = other DNA
tccctgctggtggctccagt

SEQ ID NO: 7685 - DNA, 20 bp, synthetic construct
  source 1..20: mol_type = other DNA
tcccttatcgtcaatcttct

SEQ ID NO: 7686 - DNA, 21 bp, synthetic construct
  source 1..21: mol_type = other DNA
tcccttatcgtcaatcttctc

SEQ ID NO: 7687 - DNA, 20 bp, synthetic construct
  source 1..20: mol_type = other DNA
tccctttttaccgctgttac

SEQ ID NO: 7688 - DNA, 20 bp, synthetic construct
  source 1..20: mol_type = other DNA
tccgaaagcccaggatgatg

SEQ ID NO: 7689 - DNA, 20 bp, synthetic construct
  source 1..20: mol_type = other DNA
tccgaaggtttggtacagca

SEQ ID NO: 7690 - DNA, 20 bp, synthetic construct
  source 1..20: mol_type = other DNA
tccgcaggattcagcgccga

SEQ ID NO: 7691 - DNA, 21 bp, synthetic construct
  source 1..21: mol_type = other DNA
ctagactcgtggtggacttct

SEQ ID NO: 7692 - DNA, 20 bp, synthetic construct
  source 1..20: mol_type = other DNA
tccggaagtgttgataggat

SEQ ID NO: 7693 - DNA, 20 bp, synthetic construct
  source 1..20: mol_type = other DNA
tccggcagatgagaaggcac

SEQ ID NO: 7694 - DNA, 20 bp, synthetic construct
  source 1..20: mol_type = other DNA
tccgtccgaaggtttggtac

SEQ ID NO: 7695 - DNA, 20 bp, synthetic construct
  source 1..20: mol_type = other DNA
tcctaatatacatttacacc

SEQ ID NO: 7696 - DNA, 21 bp, synthetic construct
  source 1..21: mol_type = other DNA
tcctaccttgttggcgtctgg

SEQ ID NO: 7697 - DNA, 20 bp, synthetic construct
  source 1..20: mol_type = other DNA
tcctactgttcaagcctcca

SEQ ID NO: 7698 - DNA, 20 bp, synthetic construct
  source 1..20: mol_type = other DNA
tcctagccgcttgttttgct

SEQ ID NO: 7699 - DNA, 21 bp, synthetic construct
  source 1..21: mol_type = other DNA
tcctagtacaaagacctttaa

SEQ ID NO: 7700 - DNA, 20 bp, synthetic construct
  source 1..20: mol_type = other DNA
tcctccagcttatagaccac

SEQ ID NO: 7701 - DNA, 20 bp, synthetic construct
  source 1..20: mol_type = other DNA
tcctcgagaagattgacgat

SEQ ID NO: 7702 - DNA, 20 bp, synthetic construct
  source 1..20: mol_type = other DNA
tcctctaattccaggatcct

SEQ ID NO: 7703 - DNA, 20 bp, synthetic construct
  source 1..20: mol_type = other DNA
gagaagtccaccacgagtct

SEQ ID NO: 7704 - DNA, 20 bp, synthetic construct
  source 1..20: mol_type = other DNA
tcctcttatgtaagaccttg

SEQ ID NO: 7705 - DNA, 20 bp, synthetic construct
  source 1..20: mol_type = other DNA
tcctcttcatcctgctgcta

SEQ ID NO: 7706 - DNA, 20 bp, synthetic construct
  source 1..20: mol_type = other DNA
tcctgaactggagccaccag

SEQ ID NO: 7707 - DNA, 20 bp, synthetic construct
  source 1..20: mol_type = other DNA
tcctgcctccaccaatcgcc

SEQ ID NO: 7708 - DNA, 20 bp, synthetic construct
  source 1..20: mol_type = other DNA
tcctgcggacgacccttctc

SEQ ID NO: 7709 - DNA, 20 bp, synthetic construct
  source 1..20: mol_type = other DNA
tcctggaattagaggacaaa

SEQ ID NO: 7710 - DNA, 20 bp, synthetic construct
  source 1..20: mol_type = other DNA
tcctgtcctccaacttgtcc

SEQ ID NO: 7711 - DNA, 20 bp, synthetic construct
  source 1..20: mol_type = other DNA
tcctgtctggcgattggtgg

SEQ ID NO: 7712 - DNA, 20 bp, synthetic construct
  source 1..20: mol_type = other DNA
tccttcagtacgagatcttc

SEQ ID NO: 7713 - DNA, 20 bp, synthetic construct
  source 1..20: mol_type = other DNA
tccttgagcagtagtcatgc

SEQ ID NO: 7714 - DNA, 20 bp, synthetic construct
  source 1..20: mol_type = other DNA
tccttggactcataaggtgg

SEQ ID NO: 7715 - DNA, 20 bp, synthetic construct
  source 1..20: mol_type = other DNA
tcctttgtttacgtcccgtc

SEQ ID NO: 7716 - DNA, 20 bp, synthetic construct
  source 1..20: mol_type = other DNA
tcgacccttataaagaattt

SEQ ID NO: 7717 - DNA, 20 bp, synthetic construct
  source 1..20: mol_type = other DNA
tcgagaagattgacgataag

SEQ ID NO: 7718 - DNA, 20 bp, synthetic construct
  source 1..20: mol_type = other DNA
tcgcagaagatctcaatctc

SEQ ID NO: 7719 - DNA, 20 bp, synthetic construct
  source 1..20: mol_type = other DNA
tcgcagacgaaggtctcaat

SEQ ID NO: 7720 - DNA, 20 bp, synthetic construct
  source 1..20: mol_type = other DNA
tcggaaaattcctatgggag

SEQ ID NO: 7721 - DNA, 20 bp, synthetic construct
  source 1..20: mol_type = other DNA
tcggaacggcagacggagaa

SEQ ID NO: 7722 - DNA, 20 bp, synthetic construct
  source 1..20: mol_type = other DNA
tcggcatggtcccgtgctgg

SEQ ID NO: 7723 - DNA, 20 bp, synthetic construct
  source 1..20: mol_type = other DNA
tcggcgctgaatcctgcgga

SEQ ID NO: 7724 - DNA, 20 bp, synthetic construct
  source 1..20: mol_type = other DNA
tcggtcggaacggcagacgg

SEQ ID NO: 7725 - DNA, 20 bp, synthetic construct
  source 1..20: mol_type = other DNA
tcggtcgttgacattgcaga

SEQ ID NO: 7726 - DNA, 20 bp, synthetic construct
  source 1..20: mol_type = other DNA
tcgtactgaaggaaagaagt

SEQ ID NO: 7727 - DNA, 20 bp, synthetic construct
  source 1..20: mol_type = other DNA
tcgtcaatcttctcgaggat

SEQ ID NO: 7728 - DNA, 20 bp, synthetic construct
  source 1..20: mol_type = other DNA
tcgtccgcaggattcagcgc

SEQ ID NO: 7729 - DNA, 20 bp, synthetic construct
  source 1..20: mol_type = other DNA
tcgttgacatactttccaat

SEQ ID NO: 7730 - DNA, 20 bp, synthetic construct
  source 1..20: mol_type = other DNA
tctaacaacagtagtttccg

SEQ ID NO: 7731 - DNA, 20 bp, synthetic construct
  source 1..20: mol_type = other DNA
tctaaggcttcccgatacag

SEQ ID NO: 7732 - DNA, 20 bp, synthetic construct
  source 1..20: mol_type = other DNA
tctaattccaggatcctcaa

SEQ ID NO: 7733 - DNA, 20 bp, synthetic construct
  source 1..20: mol_type = other DNA
tctagaagatctcgtactga

SEQ ID NO: 7734 - DNA, 20 bp, synthetic construct
  source 1..20: mol_type = other DNA
tctagactctgcggtattgt

SEQ ID NO: 7735 - DNA, 20 bp, synthetic construct
  source 1..20: mol_type = other DNA
tctagttaatcattacttcc

SEQ ID NO: 7736 - DNA, 20 bp, synthetic construct
  source 1..20: mol_type = other DNA
tctagtttggaagtaatgat

SEQ ID NO: 7737 - DNA, 20 bp, synthetic construct
  source 1..20: mol_type = other DNA
tctataacggtttctcttcc

SEQ ID NO: 7738 - DNA, 20 bp, synthetic construct
  source 1..20: mol_type = other DNA
tctataagctggaggagtgc

SEQ ID NO: 7739 - DNA, 20 bp, synthetic construct
  source 1..20: mol_type = other DNA
tctcaaaggtggagacagcg

SEQ ID NO: 7740 - DNA, 20 bp, synthetic construct
  source 1..20: mol_type = other DNA
tctcaatcgccgcgtcgcag

SEQ ID NO: 7741 - DNA, 20 bp, synthetic construct
  source 1..20: mol_type = other DNA
tctcactctgggatcttgca

SEQ ID NO: 7742 - DNA, 20 bp, synthetic construct
  source 1..20: mol_type = other DNA
tctccgtctgccgttccgac

SEQ ID NO: 7743 - DNA, 20 bp, synthetic construct
  source 1..20: mol_type = other DNA
tctcctcccccaactcctcc

SEQ ID NO: 7744 - DNA, 20 bp, synthetic construct
  source 1..20: mol_type = other DNA
tctcctgagcattgttcacc

SEQ ID NO: 7745 - DNA, 20 bp, synthetic construct
  source 1..20: mol_type = other DNA
tctctagatgctggatcttc

SEQ ID NO: 7746 - DNA, 20 bp, synthetic construct
  source 1..20: mol_type = other DNA
tctctcttatataatatacc

SEQ ID NO: 7747 - DNA, 20 bp, synthetic construct
  source 1..20: mol_type = other DNA
tctcttccaaaagtgagaca

SEQ ID NO: 7748 - DNA, 21 bp, synthetic construct
  source 1..21: mol_type = other DNA
tctgacttctttccttcagta

SEQ ID NO: 7749 - DNA, 20 bp, synthetic construct
  source 1..20: mol_type = other DNA
tctgcaagatcccagagtga

SEQ ID NO: 7750 - DNA, 20 bp, synthetic construct
  source 1..20: mol_type = other DNA
tctgccgttccgaccgacca

SEQ ID NO: 7751 - DNA, 20 bp, synthetic construct
  source 1..20: mol_type = other DNA
tctggactatcaaggtatgt

SEQ ID NO: 7752 - DNA, 21 bp, synthetic construct
  source 1..21: mol_type = other DNA
tctggagcaaacattatcggg

SEQ ID NO: 7753 - DNA, 20 bp, synthetic construct
  source 1..20: mol_type = other DNA
tctggccaggtgtccttgtt

SEQ ID NO: 7754 - DNA, 20 bp, synthetic construct
  source 1..20: mol_type = other DNA
tctggcgattggtggaggca

SEQ ID NO: 7755 - DNA, 20 bp, synthetic construct
  source 1..20: mol_type = other DNA
tctgtgccttctcatctgcc

SEQ ID NO: 7756 - DNA, 20 bp, synthetic construct
  source 1..20: mol_type = other DNA
tcttacataagaggactctt

SEQ ID NO: 7757 - DNA, 20 bp, synthetic construct
  source 1..20: mol_type = other DNA
tcttccaaaagtgagacaag

SEQ ID NO: 7758 - DNA, 20 bp, synthetic construct
  source 1..20: mol_type = other DNA
tcttctactgtacctgtctt

SEQ ID NO: 7759 - DNA, 20 bp, synthetic construct
  source 1..20: mol_type = other DNA
tcttctgcgacgcggcgatt

SEQ ID NO: 7760 - DNA, 20 bp, synthetic construct
  source 1..20: mol_type = other DNA
tcttcttttctcattaactg

SEQ ID NO: 7761 - DNA, 20 bp, synthetic construct
  source 1..20: mol_type = other DNA
tcttggactctctgcaatgt

SEQ ID NO: 7762 - DNA, 20 bp, synthetic construct
  source 1..20: mol_type = other DNA
tcttggtgtaaatgtatatt

SEQ ID NO: 7763 - DNA, 20 bp, synthetic construct
  source 1..20: mol_type = other DNA
tcttgtctcacttttggaag

SEQ ID NO: 7764 - DNA, 20 bp, synthetic construct
  source 1..20: mol_type = other DNA
tcttgttcccaagaatatgg

SEQ ID NO: 7765 - DNA, 20 bp, synthetic construct
  source 1..20: mol_type = other DNA
tctttaaacaaacagtcttt

SEQ ID NO: 7766 - DNA, 20 bp, synthetic construct
  source 1..20: mol_type = other DNA
tctttaatcctcattggaaa

SEQ ID NO: 7767 - DNA, 20 bp, synthetic construct
  source 1..20: mol_type = other DNA
tctttccaccagcaatcctc

SEQ ID NO: 7768 - DNA, 20 bp, synthetic construct
  source 1..20: mol_type = other DNA
tctttgctggggggaactaa

SEQ ID NO: 7769 - DNA, 20 bp, synthetic construct
  source 1..20: mol_type = other DNA
tctttgtactaggaggctgt

SEQ ID NO: 7770 - DNA, 20 bp, synthetic construct
  source 1..20: mol_type = other DNA
tctttgttttgttagggttt

SEQ ID NO: 7771 - DNA, 20 bp, synthetic construct
  source 1..20: mol_type = other DNA
tcttttcctaatatacattt

SEQ ID NO: 7772 - DNA, 20 bp, synthetic construct
  source 1..20: mol_type = other DNA
tgaaaccacaagagttgcct

SEQ ID NO: 7773 - DNA, 20 bp, synthetic construct
  source 1..20: mol_type = other DNA
tgaaagccaaacagtggggg

SEQ ID NO: 7774 - DNA, 20 bp, synthetic construct
  source 1..20: mol_type = other DNA
tgaacaagagatgattaggc

SEQ ID NO: 7775 - DNA, 20 bp, synthetic construct
  source 1..20: mol_type = other DNA
tgaacagtaggacatgaaca

SEQ ID NO: 7776 - DNA, 21 bp, synthetic construct
  source 1..21: mol_type = other DNA
tgaacagtttgtaggcccact

SEQ ID NO: 7777 - DNA, 20 bp, synthetic construct
  source 1..20: mol_type = other DNA
tgaacatggagaacatcaca

SEQ ID NO: 7778 - DNA, 21 bp, synthetic construct
  source 1..21: mol_type = other DNA
tgaacatggagaacatcacat

SEQ ID NO: 7779 - DNA, 20 bp, synthetic construct
  source 1..20: mol_type = other DNA
tgaacctttaccccgttgcc

SEQ ID NO: 7780 - DNA, 20 bp, synthetic construct
  source 1..20: mol_type = other DNA
tgaactggagccaccagcag

SEQ ID NO: 7781 - DNA, 20 bp, synthetic construct
  source 1..20: mol_type = other DNA
tgaagaggaagatgataaaa

SEQ ID NO: 7782 - DNA, 20 bp, synthetic construct
  source 1..20: mol_type = other DNA
tgaaggctggatccaactgg

SEQ ID NO: 7783 - DNA, 20 bp, synthetic construct
  source 1..20: mol_type = other DNA
tgacataacccataaaattc

SEQ ID NO: 7784 - DNA, 21 bp, synthetic construct
  source 1..21: mol_type = other DNA
tgacataacccataaaattca

SEQ ID NO: 7785 - DNA, 20 bp, synthetic construct
  source 1..20: mol_type = other DNA
tgacatactttccaatcaat

SEQ ID NO: 7786 - DNA, 20 bp, synthetic construct
  source 1..20: mol_type = other DNA
tgacattgcagagagtccaa

SEQ ID NO: 7787 - DNA, 20 bp, synthetic construct
  source 1..20: mol_type = other DNA
tgaccaagccccagccagtg

SEQ ID NO: 7788 - DNA, 20 bp, synthetic construct
  source 1..20: mol_type = other DNA
tgacgataagggagaggcag

SEQ ID NO: 7789 - DNA, 20 bp, synthetic construct
  source 1..20: mol_type = other DNA
tgacgcaacccccactggct

SEQ ID NO: 7790 - DNA, 21 bp, synthetic construct
  source 1..21: mol_type = other DNA
tgactactaggtctctagatg

SEQ ID NO: 7791 - DNA, 20 bp, synthetic construct
  source 1..20: mol_type = other DNA
tgacttctttccttcagtac

SEQ ID NO: 7792 - DNA, 20 bp, synthetic construct
  source 1..20: mol_type = other DNA
tgagaaaagaagattgcaat

SEQ ID NO: 7793 - DNA, 20 bp, synthetic construct
  source 1..20: mol_type = other DNA
tgagaccttcgtctgcgagg

SEQ ID NO: 7794 - DNA, 20 bp, synthetic construct
  source 1..20: mol_type = other DNA
tgagatcttctgcgacgcgg

SEQ ID NO: 7795 - DNA, 20 bp, synthetic construct
  source 1..20: mol_type = other DNA
tgagccaggagaaacgggct

SEQ ID NO: 7796 - DNA, 20 bp, synthetic construct
  source 1..20: mol_type = other DNA
tgagcctgagggctccaccc

SEQ ID NO: 7797 - DNA, 20 bp, synthetic construct
  source 1..20: mol_type = other DNA
tgaggatgagtgtttctcaa

SEQ ID NO: 7798 - DNA, 20 bp, synthetic construct
  source 1..20: mol_type = other DNA
tgaggattcttgtcaacaag

SEQ ID NO: 7799 - DNA, 20 bp, synthetic construct
  source 1..20: mol_type = other DNA
tgaggcatagcagcaggatg

SEQ ID NO: 7800 - DNA, 20 bp, synthetic construct
  source 1..20: mol_type = other DNA
tgaggtgaacaatgctcagg

SEQ ID NO: 7801 - DNA, 20 bp, synthetic construct
  source 1..20: mol_type = other DNA
tgagtccctttttaccgctg

SEQ ID NO: 7802 - DNA, 20 bp, synthetic construct
  source 1..20: mol_type = other DNA
tgagtgcagtatggtgaggt

SEQ ID NO: 7803 - DNA, 21 bp, synthetic construct
  source 1..21: mol_type = other DNA
tgagtgcagtatggtgaggtg

SEQ ID NO: 7804 - DNA, 20 bp, synthetic construct
  source 1..20: mol_type = other DNA
tgagtgtttctcaaaggtgg

SEQ ID NO: 7805 - DNA, 20 bp, synthetic construct
  source 1..20: mol_type = other DNA
tgatagtccagaagaaccaa

SEQ ID NO: 7806 - DNA, 20 bp, synthetic construct
  source 1..20: mol_type = other DNA
tgatgggatgggaatacagg

SEQ ID NO: 7807 - DNA, 21 bp, synthetic construct
  source 1..21: mol_type = other DNA
tgatgttctccatgttcagcg

SEQ ID NO: 7808 - DNA, 20 bp, synthetic construct
  source 1..20: mol_type = other DNA
tgattggaaagtatgtcaac

SEQ ID NO: 7809 - DNA, 20 bp, synthetic construct
  source 1..20: mol_type = other DNA
tgattggaggttggggactg

SEQ ID NO: 7810 - DNA, 20 bp, synthetic construct
  source 1..20: mol_type = other DNA
tgcaagatcccagagtgaga

SEQ ID NO: 7811 - DNA, 20 bp, synthetic construct
  source 1..20: mol_type = other DNA
tgcaattgattatgcctgct

SEQ ID NO: 7812 - DNA, 20 bp, synthetic construct
  source 1..20: mol_type = other DNA
tgcacacggtccggcagatg

SEQ ID NO: 7813 - DNA, 20 bp, synthetic construct
  source 1..20: mol_type = other DNA
tgcatacaagggcattaacg

SEQ ID NO: 7814 - DNA, 20 bp, synthetic construct
  source 1..20: mol_type = other DNA
tgcatgtattcaatctaagc

SEQ ID NO: 7815 - DNA, 20 bp, synthetic construct
  source 1..20: mol_type = other DNA
tgccaactggatcctgcgcg

SEQ ID NO: 7816 - DNA, 20 bp, synthetic construct
  source 1..20: mol_type = other DNA
tgccacaagaacacatcata

SEQ ID NO: 7817 - DNA, 20 bp, synthetic construct
  source 1..20: mol_type = other DNA
tgcccaaggtcttacataag

SEQ ID NO: 7818 - DNA, 20 bp, synthetic construct
  source 1..20: mol_type = other DNA
tgcccgtttgtcctctaatt

SEQ ID NO: 7819 - DNA, 21 bp, synthetic construct
  source 1..21: mol_type = other DNA
tgcccgtttgtcctctaattc

SEQ ID NO: 7820 - DNA, 20 bp, synthetic construct
  source 1..20: mol_type = other DNA
tgcccttgtatgcatgtatt

SEQ ID NO: 7821 - DNA, 20 bp, synthetic construct
  source 1..20: mol_type = other DNA
tgccgaacctgcatgactac

SEQ ID NO: 7822 - DNA, 20 bp, synthetic construct
  source 1..20: mol_type = other DNA
tgccgttccgaccgaccacg

SEQ ID NO: 7823 - DNA, 20 bp, synthetic construct
  source 1..20: mol_type = other DNA
tgcctacagcctcctagtac

SEQ ID NO: 7824 - DNA, 20 bp, synthetic construct
  source 1..20: mol_type = other DNA
tgcctccaccaatcgccaga

SEQ ID NO: 7825 - DNA, 20 bp, synthetic construct
  source 1..20: mol_type = other DNA
tgcctgagtgcagtatggtg

SEQ ID NO: 7826 - DNA, 20 bp, synthetic construct
  source 1..20: mol_type = other DNA
tgcctgctaggttttatcca

SEQ ID NO: 7827 - DNA, 20 bp, synthetic construct
  source 1..20: mol_type = other DNA
tgcgacgtgcagaggtgaag

SEQ ID NO: 7828 - DNA, 20 bp, synthetic construct
  source 1..20: mol_type = other DNA
tgcgagcaaaacaagcggct

SEQ ID NO: 7829 - DNA, 21 bp, synthetic construct
  source 1..21: mol_type = other DNA
tgcggtggggtgaaacccagc

SEQ ID NO: 7830 - DNA, 20 bp, synthetic construct
  source 1..20: mol_type = other DNA
tgctaggctgtgctgccaac

SEQ ID NO: 7831 - DNA, 20 bp, synthetic construct
  source 1..20: mol_type = other DNA
tgctaggttttatccaaagg

SEQ ID NO: 7832 - DNA, 20 bp, synthetic construct
  source 1..20: mol_type = other DNA
tgctccagacctgctgcgag

SEQ ID NO: 7833 - DNA, 20 bp, synthetic construct
  source 1..20: mol_type = other DNA
tgctccagctcctaccttgt

SEQ ID NO: 7834 - DNA, 20 bp, synthetic construct
  source 1..20: mol_type = other DNA
tgctcctgaactggagccac

SEQ ID NO: 7835 - DNA, 20 bp, synthetic construct
  source 1..20: mol_type = other DNA
tgctcgcagcaggtctggag

SEQ ID NO: 7836 - DNA, 20 bp, synthetic construct
  source 1..20: mol_type = other DNA
tgctggcaaagtttgtagta

SEQ ID NO: 7837 - DNA, 20 bp, synthetic construct
  source 1..20: mol_type = other DNA
tgctggtggctccagttcag

SEQ ID NO: 7838 - DNA, 21 bp, synthetic construct
  source 1..21: mol_type = other DNA
tgctggtggctccagttcagg

SEQ ID NO: 7839 - DNA, 20 bp, synthetic construct
  source 1..20: mol_type = other DNA
tgctggtggttgaggatcct

SEQ ID NO: 7840 - DNA, 20 bp, synthetic construct
  source 1..20: mol_type = other DNA
tgctgtacagacttggcccc

SEQ ID NO: 7841 - DNA, 20 bp, synthetic construct
  source 1..20: mol_type = other DNA
tgctgtaccaaaccttcgga

SEQ ID NO: 7842 - DNA, 21 bp, synthetic construct
  source 1..21: mol_type = other DNA
tgctgtaccaaaccttcggac

SEQ ID NO: 7843 - DNA, 20 bp, synthetic construct
  source 1..20: mol_type = other DNA
tgctgtagatcttgttccca

SEQ ID NO: 7844 - DNA, 20 bp, synthetic construct
  source 1..20: mol_type = other DNA
tggaaaacaccatcttttcc

SEQ ID NO: 7845 - DNA, 21 bp, synthetic construct
  source 1..21: mol_type = other DNA
tggaaagtatgtcaacgaatt

SEQ ID NO: 7846 - DNA, 20 bp, synthetic construct
  source 1..20: mol_type = other DNA
tggaaccttttcggctcctc

SEQ ID NO: 7847 - DNA, 21 bp, synthetic construct
  source 1..21: mol_type = other DNA
tggaaccttttcggctcctct

SEQ ID NO: 7848 - DNA, 20 bp, synthetic construct
  source 1..20: mol_type = other DNA
tggaaggcgggtatattata

SEQ ID NO: 7849 - DNA, 20 bp, synthetic construct
  source 1..20: mol_type = other DNA
tggacatcgacccttataaa

SEQ ID NO: 7850 - DNA, 20 bp, synthetic construct
  source 1..20: mol_type = other DNA
tggactctctgcaatgtcaa

SEQ ID NO: 7851 - DNA, 20 bp, synthetic construct
  source 1..20: mol_type = other DNA
caccacgagtctagactctg

SEQ ID NO: 7852 - DNA, 20 bp, synthetic construct
  source 1..20: mol_type = other DNA
tggataaaacctagcaggca

SEQ ID NO: 7853 - DNA, 20 bp, synthetic construct
  source 1..20: mol_type = other DNA
tggatacgatgtatatttgc

SEQ ID NO: 7854 - DNA, 20 bp, synthetic construct
  source 1..20: mol_type = other DNA
tggatccaactggtggtcgg

SEQ ID NO: 7855 - DNA, 20 bp, synthetic construct
  source 1..20: mol_type = other DNA
tggatcggcagaggagccga

SEQ ID NO: 7856 - DNA, 21 bp, synthetic construct
  source 1..21: mol_type = other DNA
tggatgatgtggtattggggg

SEQ ID NO: 7857 - DNA, 20 bp, synthetic construct
  source 1..20: mol_type = other DNA
tggatttgctgtgtttgctc

SEQ ID NO: 7858 - DNA, 20 bp, synthetic construct
  source 1..20: mol_type = other DNA
tggcaaggacccataacttc

SEQ ID NO: 7859 - DNA, 20 bp, synthetic construct
  source 1..20: mol_type = other DNA
tggcactagtaaactgagcc

SEQ ID NO: 7860 - DNA, 21 bp, synthetic construct
  source 1..21: mol_type = other DNA
tggcagcacagcctagcagcc

SEQ ID NO: 7861 - DNA, 20 bp, synthetic construct
  source 1..20: mol_type = other DNA
tggccaaaattcgcagtccc

SEQ ID NO: 7862 - DNA, 20 bp, synthetic construct
  source 1..20: mol_type = other DNA
tggccagacgccaacaaggt

SEQ ID NO: 7863 - DNA, 20 bp, synthetic construct
  source 1..20: mol_type = other DNA
tggcgattggtggaggcagg

SEQ ID NO: 7864 - DNA, 20 bp, synthetic construct
  source 1..20: mol_type = other DNA
tggctccagttcaggagcag

SEQ ID NO: 7865 - DNA, 20 bp, synthetic construct
  source 1..20: mol_type = other DNA
tggctgctaggctgtgctgc

SEQ ID NO: 7866 - DNA, 20 bp, synthetic construct
  source 1..20: mol_type = other DNA
tggctttggggcatggacat

SEQ ID NO: 7867 - DNA, 20 bp, synthetic construct
  source 1..20: mol_type = other DNA
tgggaacaagatctacagca

SEQ ID NO: 7868 - DNA, 20 bp, synthetic construct
  source 1..20: mol_type = other DNA
tgggacttcaatcccaacaa

SEQ ID NO: 7869 - DNA, 20 bp, synthetic construct
  source 1..20: mol_type = other DNA
tgggatcttgcagagtttgg

SEQ ID NO: 7870 - DNA, 20 bp, synthetic construct
  source 1..20: mol_type = other DNA
tgggattctttcccgaccac

SEQ ID NO: 7871 - DNA, 20 bp, synthetic construct
  source 1..20: mol_type = other DNA
tgggattgaagtcccaatct

SEQ ID NO: 7872 - DNA, 20 bp, synthetic construct
  source 1..20: mol_type = other DNA
tgggccatcagcgcgtgcgt

SEQ ID NO: 7873 - DNA, 20 bp, synthetic construct
  source 1..20: mol_type = other DNA
tggggaccctgcgctgaaca

SEQ ID NO: 7874 - DNA, 20 bp, synthetic construct
  source 1..20: mol_type = other DNA
tggggactgcgaattttggc

SEQ ID NO: 7875 - DNA, 20 bp, synthetic construct
  source 1..20: mol_type = other DNA
tggggcagaatctttccacc

SEQ ID NO: 7876 - DNA, 20 bp, synthetic construct
  source 1..20: mol_type = other DNA
tgggggaggagattagatta

SEQ ID NO: 7877 - DNA, 20 bp, synthetic construct
  source 1..20: mol_type = other DNA
tggggggaactaatgactct

SEQ ID NO: 7878 - DNA, 20 bp, synthetic construct
  source 1..20: mol_type = other DNA
tggggtggagccctcaggct

SEQ ID NO: 7879 - DNA, 21 bp, synthetic construct
  source 1..21: mol_type = other DNA
tggggttactctctgaatttt

SEQ ID NO: 7880 - DNA, 20 bp, synthetic construct
  source 1..20: mol_type = other DNA
tgggtgggtgttaatttgga

SEQ ID NO: 7881 - DNA, 21 bp, synthetic construct
  source 1..21: mol_type = other DNA
tgggttatgtcattggaagtt

SEQ ID NO: 7882 - DNA, 20 bp, synthetic construct
  source 1..20: mol_type = other DNA
tgggtttcaccccaccgcac

SEQ ID NO: 7883 - DNA, 21 bp, synthetic construct
  source 1..21: mol_type = other DNA
tgggttttgctgccccattta

SEQ ID NO: 7884 - DNA, 20 bp, synthetic construct
  source 1..20: mol_type = other DNA
tggtcccgtgctggtggttg

SEQ ID NO: 7885 - DNA, 20 bp, synthetic construct
  source 1..20: mol_type = other DNA
tggtcgggaaagaatcccag

SEQ ID NO: 7886 - DNA, 20 bp, synthetic construct
  source 1..20: mol_type = other DNA
tggtcggtcggaacggcaga

SEQ ID NO: 7887 - DNA, 20 bp, synthetic construct
  source 1..20: mol_type = other DNA
tggtctataagctggaggag

SEQ ID NO: 7888 - DNA, 21 bp, synthetic construct
  source 1..21: mol_type = other DNA
tggtctataagctggaggagt

SEQ ID NO: 7889 - DNA, 20 bp, synthetic construct
  source 1..20: mol_type = other DNA
tggtctccatgcgacgtgca

SEQ ID NO: 7890 - DNA, 20 bp, synthetic construct
  source 1..20: mol_type = other DNA
tggtctgcgcaccagcacca

SEQ ID NO: 7891 - DNA, 20 bp, synthetic construct
  source 1..20: mol_type = other DNA
tggtgacccacaaaatgagg

SEQ ID NO: 7892 - DNA, 20 bp, synthetic construct
  source 1..20: mol_type = other DNA
tggtgaggtgaacaatgctc

SEQ ID NO: 7893 - DNA, 20 bp, synthetic construct
  source 1..20: mol_type = other DNA
tggtgagtgattggaggttg

SEQ ID NO: 7894 - DNA, 20 bp, synthetic construct
  source 1..20: mol_type = other DNA
tggtggctccagttcaggag

SEQ ID NO: 7895 - DNA, 20 bp, synthetic construct
  source 1..20: mol_type = other DNA
tggtggtcgggaaagaatcc

SEQ ID NO: 7896 - DNA, 20 bp, synthetic construct
  source 1..20: mol_type = other DNA
tggtggtctataagctggag

SEQ ID NO: 7897 - DNA, 20 bp, synthetic construct
  source 1..20: mol_type = other DNA
tggtgtaaatgtatattagg

SEQ ID NO: 7898 - DNA, 21 bp, synthetic construct
  source 1..21: mol_type = other DNA
tggtgtaaatgtatattagga

SEQ ID NO: 7899 - DNA, 20 bp, synthetic construct
  source 1..20: mol_type = other DNA
tggtgttttccaatgaggat

SEQ ID NO: 7900 - DNA, 20 bp, synthetic construct
  source 1..20: mol_type = other DNA
tggttatcgctggatgtgtc

SEQ ID NO: 7901 - DNA, 20 bp, synthetic construct
  source 1..20: mol_type = other DNA
tggttgaggatcctggaatt

SEQ ID NO: 7902 - DNA, 20 bp, synthetic construct
  source 1..20: mol_type = other DNA
tgtaaatagtgtctagtttg

SEQ ID NO: 7903 - DNA, 20 bp, synthetic construct
  source 1..20: mol_type = other DNA
tgtaaatgtatattaggaaa

SEQ ID NO: 7904 - DNA, 21 bp, synthetic construct
  source 1..21: mol_type = other DNA
tgtaaatgtatattaggaaaa

SEQ ID NO: 7905 - DNA, 20 bp, synthetic construct
  source 1..20: mol_type = other DNA
tgtaacacgagaaggggtcc

SEQ ID NO: 7906 - DNA, 21 bp, synthetic construct
  source 1..21: mol_type = other DNA
tgtaacacgagaaggggtcct

SEQ ID NO: 7907 - DNA, 20 bp, synthetic construct
  source 1..20: mol_type = other DNA
tgtaagttggcgagaaagtg

SEQ ID NO: 7908 - DNA, 20 bp, synthetic construct
  source 1..20: mol_type = other DNA
tgtaccaaaccttcggacgg

SEQ ID NO: 7909 - DNA, 21 bp, synthetic construct
  source 1..21: mol_type = other DNA
tgtagatcttgttcccaagaa

SEQ ID NO: 7910 - DNA, 20 bp, synthetic construct
  source 1..20: mol_type = other DNA
tgtaggcataaattggtctg

SEQ ID NO: 7911 - DNA, 20 bp, synthetic construct
  source 1..20: mol_type = other DNA
tgtagtatgccctgagcctg

SEQ ID NO: 7912 - DNA, 20 bp, synthetic construct
  source 1..20: mol_type = other DNA
tgtatacccaaagacaaaag

SEQ ID NO: 7913 - DNA, 20 bp, synthetic construct
  source 1..20: mol_type = other DNA
tgtatatttgcgggagagga

SEQ ID NO: 7914 - DNA, 20 bp, synthetic construct
  source 1..20: mol_type = other DNA
tgtatgatgtgttcttgtgg

SEQ ID NO: 7915 - DNA, 20 bp, synthetic construct
  source 1..20: mol_type = other DNA
tgtatgcatgtattcaatct

SEQ ID NO: 7916 - DNA, 20 bp, synthetic construct
  source 1..20: mol_type = other DNA
tgtcaacactaatatgggcc

SEQ ID NO: 7917 - DNA, 21 bp, synthetic construct
  source 1..21: mol_type = other DNA
tgtcaacgaattgtgggtctt

SEQ ID NO: 7918 - DNA, 20 bp, synthetic construct
  source 1..20: mol_type = other DNA
tgtcctactgttcaagcctc

SEQ ID NO: 7919 - DNA, 21 bp, synthetic construct
  source 1..21: mol_type = other DNA
tgtccttgttgggattgaagt

SEQ ID NO: 7920 - DNA, 20 bp, synthetic construct
  source 1..20: mol_type = other DNA
tgtctggcgattggtggagg

SEQ ID NO: 7921 - DNA, 20 bp, synthetic construct
  source 1..20: mol_type = other DNA
tgtcttggtgtaaatgtata

SEQ ID NO: 7922 - DNA, 20 bp, synthetic construct
  source 1..20: mol_type = other DNA
tgtctttaatcctcattgga

SEQ ID NO: 7923 - DNA, 20 bp, synthetic construct
  source 1..20: mol_type = other DNA
tgtctttcggagtgtggatt

SEQ ID NO: 7924 - DNA, 20 bp, synthetic construct
  source 1..20: mol_type = other DNA
tgtgaggattcttgtcaaca

SEQ ID NO: 7925 - DNA, 20 bp, synthetic construct
  source 1..20: mol_type = other DNA
tgtgcacttcgcttcacctc

SEQ ID NO: 7926 - DNA, 20 bp, synthetic construct
  source 1..20: mol_type = other DNA
tgtgccttgggtggctttgg

SEQ ID NO: 7927 - DNA, 20 bp, synthetic construct
  source 1..20: mol_type = other DNA
tgtggagttactctcgtttt

SEQ ID NO: 7928 - DNA, 20 bp, synthetic construct
  source 1..20: mol_type = other DNA
tgtgggtcaccatattcttg

SEQ ID NO: 7929 - DNA, 20 bp, synthetic construct
  source 1..20: mol_type = other DNA
tgtgtaaatagtgtctagtt

SEQ ID NO: 7930 - DNA, 21 bp, synthetic construct
  source 1..21: mol_type = other DNA
tgtgtaaatagtgtctagttt

SEQ ID NO: 7931 - DNA, 20 bp, synthetic construct
  source 1..20: mol_type = other DNA
tgtgtcttggccaaaattcg

SEQ ID NO: 7932 - DNA, 20 bp, synthetic construct
  source 1..20: mol_type = other DNA
tgtgttgtttctctcttata

SEQ ID NO: 7933 - DNA, 20 bp, synthetic construct
  source 1..20: mol_type = other DNA
tgttaataggaagttttcta

SEQ ID NO: 7934 - DNA, 21 bp, synthetic construct
  source 1..21: mol_type = other DNA
tgttagtattccttggactca

SEQ ID NO: 7935 - DNA, 20 bp, synthetic construct
  source 1..20: mol_type = other DNA
tgttcatgtcctactgttca

SEQ ID NO: 7936 - DNA, 20 bp, synthetic construct
  source 1..20: mol_type = other DNA
tgttctccatgttcagcgca

SEQ ID NO: 7937 - DNA, 20 bp, synthetic construct
  source 1..20: mol_type = other DNA
tgttgacataactgactact

SEQ ID NO: 7938 - DNA, 20 bp, synthetic construct
  source 1..20: mol_type = other DNA
tgttgcccaaggtcttacat

SEQ ID NO: 7939 - DNA, 20 bp, synthetic construct
  source 1..20: mol_type = other DNA
tgttgctgtaccaaaccttc

SEQ ID NO: 7940 - DNA, 21 bp, synthetic construct
  source 1..21: mol_type = other DNA
tgttgggattgaagtcccaat

SEQ ID NO: 7941 - DNA, 20 bp, synthetic construct
  source 1..20: mol_type = other DNA
tgttggttcttctggactat

SEQ ID NO: 7942 - DNA, 20 bp, synthetic construct
  source 1..20: mol_type = other DNA
tgtttacgtcccgtcggcgc

SEQ ID NO: 7943 - DNA, 20 bp, synthetic construct
  source 1..20: mol_type = other DNA
tgtttctcaaaggtggagac

SEQ ID NO: 7944 - DNA, 20 bp, synthetic construct
  source 1..20: mol_type = other DNA
tgtttgctccagacctgctg

SEQ ID NO: 7945 - DNA, 20 bp, synthetic construct
  source 1..20: mol_type = other DNA
tgtttggctttcagttatat

SEQ ID NO: 7946 - DNA, 21 bp, synthetic construct
  source 1..21: mol_type = other DNA
tgtttggctttcagttatatg

SEQ ID NO: 7947 - DNA, 20 bp, synthetic construct
  source 1..20: mol_type = other DNA
tgtttgtttaaagactggga

SEQ ID NO: 7948 - DNA, 20 bp, synthetic construct
  source 1..20: mol_type = other DNA
tgttttagaaaacttcctat

SEQ ID NO: 7949 - DNA, 20 bp, synthetic construct
  source 1..20: mol_type = other DNA
tgttttccaatgaggattaa

SEQ ID NO: 7950 - DNA, 20 bp, synthetic construct
  source 1..20: mol_type = other DNA
tgttttgctcgcagcaggtc

SEQ ID NO: 7951 - DNA, 20 bp, synthetic construct
  source 1..20: mol_type = other DNA
ttaaaccctaacaaaacaaa

SEQ ID NO: 7952 - DNA, 20 bp, synthetic construct
  source 1..20: mol_type = other DNA
ttaaagacaggtacagtaga

SEQ ID NO: 7953 - DNA, 20 bp, synthetic construct
  source 1..20: mol_type = other DNA
ttaaagactgggaggagttg

SEQ ID NO: 7954 - DNA, 20 bp, synthetic construct
  source 1..20: mol_type = other DNA
ttaaaggtctttgtactagg

SEQ ID NO: 7955 - DNA, 20 bp, synthetic construct
  source 1..20: mol_type = other DNA
ttaaatgtatacccaaagac

SEQ ID NO: 7956 - DNA, 20 bp, synthetic construct
  source 1..20: mol_type = other DNA
ttaacacccacccaggtagc

SEQ ID NO: 7957 - DNA, 20 bp, synthetic construct
  source 1..20: mol_type = other DNA
ttaacaggcctattgattgg

SEQ ID NO: 7958 - DNA, 21 bp, synthetic construct
  source 1..21: mol_type = other DNA
ttaactagatgttctggataa

SEQ ID NO: 7959 - DNA, 20 bp, synthetic construct
  source 1..20: mol_type = other DNA
ttaactgtaagtgggcctac

SEQ ID NO: 7960 - DNA, 20 bp, synthetic construct
  source 1..20: mol_type = other DNA
ttaatacccttatccaatgg

SEQ ID NO: 7961 - DNA, 20 bp, synthetic construct
  source 1..20: mol_type = other DNA
ttaatcattacttccaaact

SEQ ID NO: 7962 - DNA, 20 bp, synthetic construct
  source 1..20: mol_type = other DNA
ttaatgagaaaagaagattg

SEQ ID NO: 7963 - DNA, 20 bp, synthetic construct
  source 1..20: mol_type = other DNA
ttacacactctatggaaggc

SEQ ID NO: 7964 - DNA, 20 bp, synthetic construct
  source 1..20: mol_type = other DNA
ttacaccaagacattatcaa

SEQ ID NO: 7965 - DNA, 20 bp, synthetic construct
  source 1..20: mol_type = other DNA
ttacagttaatgagaaaaga

SEQ ID NO: 7966 - DNA, 20 bp, synthetic construct
  source 1..20: mol_type = other DNA
ttaccattggataagggtat

SEQ ID NO: 7967 - DNA, 20 bp, synthetic construct
  source 1..20: mol_type = other DNA
ttaccccgttgcccggcaac

SEQ ID NO: 7968 - DNA, 20 bp, synthetic construct
  source 1..20: mol_type = other DNA
ttacgcggactccccgtctg

SEQ ID NO: 7969 - DNA, 20 bp, synthetic construct
  source 1..20: mol_type = other DNA
ttactctcgtttttgccttc

SEQ ID NO: 7970 - DNA, 20 bp, synthetic construct
  source 1..20: mol_type = other DNA
ttactgctcctgaactggag

SEQ ID NO: 7971 - DNA, 20 bp, synthetic construct
  source 1..20: mol_type = other DNA
ttagaaaacttcctattaac

SEQ ID NO: 7972 - DNA, 20 bp, synthetic construct
  source 1..20: mol_type = other DNA
ttagattaaaggtctttgta

SEQ ID NO: 7973 - DNA, 20 bp, synthetic construct
  source 1..20: mol_type = other DNA
ttagattgaatacatgcata

SEQ ID NO: 7974 - DNA, 20 bp, synthetic construct
  source 1..20: mol_type = other DNA
ttaggcagaggtgaaaaagt

SEQ ID NO: 7975 - DNA, 20 bp, synthetic construct
  source 1..20: mol_type = other DNA
ttagggtttaaatgtatacc

SEQ ID NO: 7976 - DNA, 20 bp, synthetic construct
  source 1..20: mol_type = other DNA
ttagtattccttggactcat

SEQ ID NO: 7977 - DNA, 20 bp, synthetic construct
  source 1..20: mol_type = other DNA
ttatatggatgatgtggtat

SEQ ID NO: 7978 - DNA, 20 bp, synthetic construct
  source 1..20: mol_type = other DNA
ttatcagtcccgataatgtt

SEQ ID NO: 7979 - DNA, 20 bp, synthetic construct
  source 1..20: mol_type = other DNA
ttatcgctggatgtgtctgc

SEQ ID NO: 7980 - DNA, 20 bp, synthetic construct
  source 1..20: mol_type = other DNA
ttcaaagactgtttgtttaa

SEQ ID NO: 7981 - DNA, 21 bp, synthetic construct
  source 1..21: mol_type = other DNA
ttcaagcctccaagctgtgcc

SEQ ID NO: 7982 - DNA, 20 bp, synthetic construct
  source 1..20: mol_type = other DNA
ttcacctctgcacgtcgcat

SEQ ID NO: 7983 - DNA, 20 bp, synthetic construct
  source 1..20: mol_type = other DNA
ttcactttctcgccaactta

SEQ ID NO: 7984 - DNA, 21 bp, synthetic construct
  source 1..21: mol_type = other DNA
ttcagagcaaacacagcaaat

SEQ ID NO: 7985 - DNA, 20 bp, synthetic construct
  source 1..20: mol_type = other DNA
ttcaggtattgtttacacag

SEQ ID NO: 7986 - DNA, 20 bp, synthetic construct
  source 1..20: mol_type = other DNA
ttccaaattaacacccaccc

SEQ ID NO: 7987 - DNA, 20 bp, synthetic construct
  source 1..20: mol_type = other DNA
ttccaatgacataacccata

SEQ ID NO: 7988 - DNA, 20 bp, synthetic construct
  source 1..20: mol_type = other DNA
ttccaatgaggattaaagac

SEQ ID NO: 7989 - DNA, 20 bp, synthetic construct
  source 1..20: mol_type = other DNA
ttccaggatcctcaaccacc

SEQ ID NO: 7990 - DNA, 20 bp, synthetic construct
  source 1..20: mol_type = other DNA
ttccccaccttatgagtcca

SEQ ID NO: 7991 - DNA, 20 bp, synthetic construct
  source 1..20: mol_type = other DNA
ttcccccactgtttggcttt

SEQ ID NO: 7992 - DNA, 20 bp, synthetic construct
  source 1..20: mol_type = other DNA
ttccccctagaaaattgaga

SEQ ID NO: 7993 - DNA, 20 bp, synthetic construct
  source 1..20: mol_type = other DNA
ttcccgagattgagatcttc

SEQ ID NO: 7994 - DNA, 20 bp, synthetic construct
  source 1..20: mol_type = other DNA
ttcccgatacagagctgagg

SEQ ID NO: 7995 - DNA, 20 bp, synthetic construct
  source 1..20: mol_type = other DNA
ttccgaaagcccaggatgat

SEQ ID NO: 7996 - DNA, 20 bp, synthetic construct
  source 1..20: mol_type = other DNA
ttccgcagtatggatcggca

SEQ ID NO: 7997 - DNA, 20 bp, synthetic construct
  source 1..20: mol_type = other DNA
ttccggaaactactgttgtt

SEQ ID NO: 7998 - DNA, 20 bp, synthetic construct
  source 1..20: mol_type = other DNA
ttccggaagtgttgatagga

SEQ ID NO: 7999 - DNA, 20 bp, synthetic construct
  source 1..20: mol_type = other DNA
ttccgtccgaaggtttggta

SEQ ID NO: 8000 - DNA, 20 bp, synthetic construct
  source 1..20: mol_type = other DNA
ttcctaatatacatttacac

SEQ ID NO: 8001 - DNA, 20 bp, synthetic construct
  source 1..20: mol_type = other DNA
ttcctatgggagtgggcctc

SEQ ID NO: 8002 - DNA, 20 bp, synthetic construct
  source 1..20: mol_type = other DNA
ttcctgtctggcgattggtg

SEQ ID NO: 8003 - DNA, 20 bp, synthetic construct
  source 1..20: mol_type = other DNA
ttccttgagcagtagtcatg

SEQ ID NO: 8004 - DNA, 20 bp, synthetic construct
  source 1..20: mol_type = other DNA
ttccttggactcataaggtg

SEQ ID NO: 8005 - DNA, 20 bp, synthetic construct
  source 1..20: mol_type = other DNA
ttcgcactcctccagcttat

SEQ ID NO: 8006 - DNA, 20 bp, synthetic construct
  source 1..20: mol_type = other DNA
ttcgcttcacctctgcacgt

SEQ ID NO: 8007 - DNA, 20 bp, synthetic construct
  source 1..20: mol_type = other DNA
ttctcaaaggtggagacagc

SEQ ID NO: 8008 - DNA, 20 bp, synthetic construct
  source 1..20: mol_type = other DNA
ttctcatctgccggaccgtg

SEQ ID NO: 8009 - DNA, 20 bp, synthetic construct
  source 1..20: mol_type = other DNA
ttctcgaggattggggaccc

SEQ ID NO: 8010 - DNA, 20 bp, synthetic construct
  source 1..20: mol_type = other DNA
ttctctcaattttctagggg

SEQ ID NO: 8011 - DNA, 20 bp, synthetic construct
  source 1..20: mol_type = other DNA
ttctcttccaaaagtgagac

SEQ ID NO: 8012 - DNA, 21 bp, synthetic construct
  source 1..21: mol_type = other DNA
ttctcttccaaaagtgagaca

SEQ ID NO: 8013 - DNA, 20 bp, synthetic construct
  source 1..20: mol_type = other DNA
ttcttgggaacaagatctac

SEQ ID NO: 8014 - DNA, 20 bp, synthetic construct
  source 1..20: mol_type = other DNA
ttcttgtctcacttttggaa

SEQ ID NO: 8015 - DNA, 20 bp, synthetic construct
  source 1..20: mol_type = other DNA
ttctttcccgaccaccagtt

SEQ ID NO: 8016 - DNA, 20 bp, synthetic construct
  source 1..20: mol_type = other DNA
ttgaacagtaggacatgaac

SEQ ID NO: 8017 - DNA, 21 bp, synthetic construct
  source 1..21: mol_type = other DNA
ttgaacagtaggacatgaaca

SEQ ID NO: 8018 - DNA, 20 bp, synthetic construct
  source 1..20: mol_type = other DNA
ttgaagtcccaatctggatt

SEQ ID NO: 8019 - DNA, 20 bp, synthetic construct
  source 1..20: mol_type = other DNA
ttgacatactttccaatcaa

SEQ ID NO: 8020 - DNA, 20 bp, synthetic construct
  source 1..20: mol_type = other DNA
ttgacattgcagagagtcca

SEQ ID NO: 8021 - DNA, 20 bp, synthetic construct
  source 1..20: mol_type = other DNA
ttgagaaacactcatcctca

SEQ ID NO: 8022 - DNA, 20 bp, synthetic construct
  source 1..20: mol_type = other DNA
ttgaggatcctggaattaga

SEQ ID NO: 8023 - DNA, 20 bp, synthetic construct
  source 1..20: mol_type = other DNA
ttgattggaaagtatgtcaa

SEQ ID NO: 8024 - DNA, 20 bp, synthetic construct
  source 1..20: mol_type = other DNA
ttgcaatcttcttttctcat

SEQ ID NO: 8025 - DNA, 20 bp, synthetic construct
  source 1..20: mol_type = other DNA
ttgcaattgattatgcctgc

SEQ ID NO: 8026 - DNA, 21 bp, synthetic construct
  source 1..21: mol_type = other DNA
ttgcatggtgctggtgcgcag

SEQ ID NO: 8027 - DNA, 20 bp, synthetic construct
  source 1..20: mol_type = other DNA
ttgccagcaaatccgcctcc

SEQ ID NO: 8028 - DNA, 20 bp, synthetic construct
  source 1..20: mol_type = other DNA
ttgcccaaggtcttacataa

SEQ ID NO: 8029 - DNA, 21 bp, synthetic construct
  source 1..21: mol_type = other DNA
ttgcctgaactttaggcccat

SEQ ID NO: 8030 - DNA, 20 bp, synthetic construct
  source 1..20: mol_type = other DNA
ttgcctgagtgcagtatggt

SEQ ID NO: 8031 - DNA, 21 bp, synthetic construct
  source 1..21: mol_type = other DNA
ttgctctgaaggctggatcca

SEQ ID NO: 8032 - DNA, 20 bp, synthetic construct
  source 1..20: mol_type = other DNA
ttgctgacgcaacccccact

SEQ ID NO: 8033 - DNA, 21 bp, synthetic construct
  source 1..21: mol_type = other DNA
ttgctgtgtttgctctgaagg

SEQ ID NO: 8034 - DNA, 20 bp, synthetic construct
  source 1..20: mol_type = other DNA
ttgcttgcctgagtgcagta

SEQ ID NO: 8035 - DNA, 20 bp, synthetic construct
  source 1..20: mol_type = other DNA
ttggaagagaaaccgttata

SEQ ID NO: 8036 - DNA, 20 bp, synthetic construct
  source 1..20: mol_type = other DNA
ttggaagatccagcatctag

SEQ ID NO: 8037 - DNA, 20 bp, synthetic construct
  source 1..20: mol_type = other DNA
ttggaggacaggaggttggt

SEQ ID NO: 8038 - DNA, 21 bp, synthetic construct
  source 1..21: mol_type = other DNA
ttggaggacaggaggttggtg

SEQ ID NO: 8039 - DNA, 20 bp, synthetic construct
  source 1..20: mol_type = other DNA
ttggatccagccttcagagc

SEQ ID NO: 8040 - DNA, 20 bp, synthetic construct
  source 1..20: mol_type = other DNA
ttggcgagaaagtgaaagcc

SEQ ID NO: 8041 - DNA, 20 bp, synthetic construct
  source 1..20: mol_type = other DNA
ttggctttcagttatatgga

SEQ ID NO: 8042 - DNA, 20 bp, synthetic construct
  source 1..20: mol_type = other DNA
ttgggacttcaatcccaaca

SEQ ID NO: 8043 - DNA, 20 bp, synthetic construct
  source 1..20: mol_type = other DNA
ttgggattgaagtcccaatc

SEQ ID NO: 8044 - DNA, 20 bp, synthetic construct
  source 1..20: mol_type = other DNA
ttgggggaggagattagatt

SEQ ID NO: 8045 - DNA, 20 bp, synthetic construct
  source 1..20: mol_type = other DNA
ttgggtatacatttaaaccc

SEQ ID NO: 8046 - DNA, 20 bp, synthetic construct
  source 1..20: mol_type = other DNA
ttggtaacagcggtaaaaag

SEQ ID NO: 8047 - DNA, 20 bp, synthetic construct
  source 1..20: mol_type = other DNA
ttggtgagtgattggaggtt

SEQ ID NO: 8048 - DNA, 20 bp, synthetic construct
  source 1..20: mol_type = other DNA
ttggtggtctataagctgga

SEQ ID NO: 8049 - DNA, 20 bp, synthetic construct
  source 1..20: mol_type = other DNA
ttggtgtaaatgtatattag

SEQ ID NO: 8050 - DNA, 20 bp, synthetic construct
  source 1..20: mol_type = other DNA
ttggttcttctggactatca

SEQ ID NO: 8051 - DNA, 20 bp, synthetic construct
  source 1..20: mol_type = other DNA
ttgtaagttggcgagaaagt

SEQ ID NO: 8052 - DNA, 21 bp, synthetic construct
  source 1..21: mol_type = other DNA
ttgtactaggaggctgtaggc

SEQ ID NO: 8053 - DNA, 20 bp, synthetic construct
  source 1..20: mol_type = other DNA
ttgtagtatgccctgagcct

SEQ ID NO: 8054 - DNA, 20 bp, synthetic construct
  source 1..20: mol_type = other DNA
ttgtatgcatgtattcaatc

SEQ ID NO: 8055 - DNA, 20 bp, synthetic construct
  source 1..20: mol_type = other DNA
ttgtctcacttttggaagag

SEQ ID NO: 8056 - DNA, 20 bp, synthetic construct
  source 1..20: mol_type = other DNA
ttgtctttgggtatacattt

SEQ ID NO: 8057 - DNA, 20 bp, synthetic construct
  source 1..20: mol_type = other DNA
ttgtgaggattcttgtcaac

SEQ ID NO: 8058 - DNA, 21 bp, synthetic construct
  source 1..21: mol_type = other DNA
ttgtggcaaggacccataact

SEQ ID NO: 8059 - DNA, 20 bp, synthetic construct
  source 1..20: mol_type = other DNA
ttgtgggtcaccatattctt

SEQ ID NO: 8060 - DNA, 20 bp, synthetic construct
  source 1..20: mol_type = other DNA
ttgttcatgtcctactgttc

SEQ ID NO: 8061 - DNA, 21 bp, synthetic construct
  source 1..21: mol_type = other DNA
ttgttggttcttctggactat

SEQ ID NO: 8062 - DNA, 21 bp, synthetic construct
  source 1..21: mol_type = other DNA
ttgtttacacagaaaggcctt

SEQ ID NO: 8063 - DNA, 20 bp, synthetic construct
  source 1..20: mol_type = other DNA
tttaaaccctaacaaaacaa

SEQ ID NO: 8064 - DNA, 20 bp, synthetic construct
  source 1..20: mol_type = other DNA
tttaaagactgggaggagtt

SEQ ID NO: 8065 - DNA, 20 bp, synthetic construct
  source 1..20: mol_type = other DNA
tttaaatgtatacccaaaga

SEQ ID NO: 8066 - DNA, 20 bp, synthetic construct
  source 1..20: mol_type = other DNA
tttaatctaatctcctcccc

SEQ ID NO: 8067 - DNA, 20 bp, synthetic construct
  source 1..20: mol_type = other DNA
tttacacaatgtggttatcc

SEQ ID NO: 8068 - DNA, 20 bp, synthetic construct
  source 1..20: mol_type = other DNA
tttacacactctatggaagg

SEQ ID NO: 8069 - DNA, 20 bp, synthetic construct
  source 1..20: mol_type = other DNA
tttacacagaaaggccttgt

SEQ ID NO: 8070 - DNA, 20 bp, synthetic construct
  source 1..20: mol_type = other DNA
tttacaccaagacattatca

SEQ ID NO: 8071 - DNA, 20 bp, synthetic construct
  source 1..20: mol_type = other DNA
tttaccccgttgcccggcaa

SEQ ID NO: 8072 - DNA, 20 bp, synthetic construct
  source 1..20: mol_type = other DNA
tttagaaaacttcctattaa

SEQ ID NO: 8073 - DNA, 20 bp, synthetic construct
  source 1..20: mol_type = other DNA
tttataagggtcgatgtcca

SEQ ID NO: 8074 - DNA, 20 bp, synthetic construct
  source 1..20: mol_type = other DNA
tttatgggttatgtcattgg

SEQ ID NO: 8075 - DNA, 20 bp, synthetic construct
  source 1..20: mol_type = other DNA
tttcagttatatggatgatg

SEQ ID NO: 8076 - DNA, 20 bp, synthetic construct
  source 1..20: mol_type = other DNA
tttccaatcaataggcctgt

SEQ ID NO: 8077 - DNA, 20 bp, synthetic construct
  source 1..20: mol_type = other DNA
tttccaatgaggattaaaga

SEQ ID NO: 8078 - DNA, 20 bp, synthetic construct
  source 1..20: mol_type = other DNA
tttccaccagcaatcctctg

SEQ ID NO: 8079 - DNA, 20 bp, synthetic construct
  source 1..20: mol_type = other DNA
tttccgaaagcccaggatga

SEQ ID NO: 8080 - DNA, 21 bp, synthetic construct
  source 1..21: mol_type = other DNA
tttccttcagtacgagatctt

SEQ ID NO: 8081 - DNA, 20 bp, synthetic construct
  source 1..20: mol_type = other DNA
tttctcaaaggtggagacag

SEQ ID NO: 8082 - DNA, 20 bp, synthetic construct
  source 1..20: mol_type = other DNA
tttctcattaactgtaagtg

SEQ ID NO: 8083 - DNA, 20 bp, synthetic construct
  source 1..20: mol_type = other DNA
tttctcctggctcagtttac

SEQ ID NO: 8084 - DNA, 20 bp, synthetic construct
  source 1..20: mol_type = other DNA
tttctcttccaaaagtgaga

SEQ ID NO: 8085 - DNA, 20 bp, synthetic construct
  source 1..20: mol_type = other DNA
tttctgtgtaaacaatacct

SEQ ID NO: 8086 - DNA, 20 bp, synthetic construct
  source 1..20: mol_type = other DNA
tttcttgtctcacttttgga

SEQ ID NO: 8087 - DNA, 21 bp, synthetic construct
  source 1..21: mol_type = other DNA
tttcttgttgacaagaatcct

SEQ ID NO: 8088 - DNA, 20 bp, synthetic construct
  source 1..20: mol_type = other DNA
tttgaagtatgcctcaaggt

SEQ ID NO: 8089 - DNA, 20 bp, synthetic construct
  source 1..20: mol_type = other DNA
tttgagaaacactcatcctc

SEQ ID NO: 8090 - DNA, 21 bp, synthetic construct
  source 1..21: mol_type = other DNA
tttgccttctgacttctttcc

SEQ ID NO: 8091 - DNA, 20 bp, synthetic construct
  source 1..20: mol_type = other DNA
tttgctccagacctgctgcg

SEQ ID NO: 8092 - DNA, 20 bp, synthetic construct
  source 1..20: mol_type = other DNA
tttgctcgcagcaggtctgg

SEQ ID NO: 8093 - DNA, 20 bp, synthetic construct
  source 1..20: mol_type = other DNA
tttgctctgaaggctggatc

SEQ ID NO: 8094 - DNA, 20 bp, synthetic construct
  source 1..20: mol_type = other DNA
tttgctgacgcaacccccac

SEQ ID NO: 8095 - DNA, 21 bp, synthetic construct
  source 1..21: mol_type = other DNA
tttgctgccccatttacacaa

SEQ ID NO: 8096 - DNA, 20 bp, synthetic construct
  source 1..20: mol_type = other DNA
tttgctgtgtttgctctgaa

SEQ ID NO: 8097 - DNA, 20 bp, synthetic construct
  source 1..20: mol_type = other DNA
tttggaagagaaaccgttat

SEQ ID NO: 8098 - DNA, 20 bp, synthetic construct
  source 1..20: mol_type = other DNA
tttggaagatccagcatcta

SEQ ID NO: 8099 - DNA, 20 bp, synthetic construct
  source 1..20: mol_type = other DNA
tttggaagtaatgattaact

SEQ ID NO: 8100 - DNA, 20 bp, synthetic construct
  source 1..20: mol_type = other DNA
tttggtggtctataagctgg

SEQ ID NO: 8101 - DNA, 20 bp, synthetic construct
  source 1..20: mol_type = other DNA
tttggtgtctttcggagtgt

SEQ ID NO: 8102 - DNA, 20 bp, synthetic construct
  source 1..20: mol_type = other DNA
tttgtaggcccacttacagt

SEQ ID NO: 8103 - DNA, 20 bp, synthetic construct
  source 1..20: mol_type = other DNA
tttgtagtatgccctgagcc

SEQ ID NO: 8104 - DNA, 20 bp, synthetic construct
  source 1..20: mol_type = other DNA
tttgtatgatgtgttcttgt

SEQ ID NO: 8105 - DNA, 20 bp, synthetic construct
  source 1..20: mol_type = other DNA
tttgtctttgggtatacatt

SEQ ID NO: 8106 - DNA, 20 bp, synthetic construct
  source 1..20: mol_type = other DNA
tttgtgggtcaccatattct

SEQ ID NO: 8107 - DNA, 21 bp, synthetic construct
  source 1..21: mol_type = other DNA
tttgtttacgtcccgtcggcg

SEQ ID NO: 8108 - DNA, 20 bp, synthetic construct
  source 1..20: mol_type = other DNA
ttttatgggttatgtcattg

SEQ ID NO: 8109 - DNA, 21 bp, synthetic construct
  source 1..21: mol_type = other DNA
ttttccgaaagcccaggatga

SEQ ID NO: 8110 - DNA, 20 bp, synthetic construct
  source 1..20: mol_type = other DNA
ttttctcattaactgtaagt

SEQ ID NO: 8111 - DNA, 20 bp, synthetic construct
  source 1..20: mol_type = other DNA
ttttgataatgtcttggtgt

SEQ ID NO: 8112 - DNA, 20 bp, synthetic construct
  source 1..20: mol_type = other DNA
ttttgctcgcagcaggtctg

SEQ ID NO: 8113 - DNA, 20 bp, synthetic construct
  source 1..20: mol_type = other DNA
ttttggaagagaaaccgtta

SEQ ID NO: 8114 - DNA, 20 bp, synthetic construct
  source 1..20: mol_type = other DNA
ttttgtatgatgtgttcttg

SEQ ID NO: 8115 - DNA, 20 bp, synthetic construct
  source 1..20: mol_type = other DNA
tttttgataatgtcttggtg

SEQ ID NO: 8116 - DNA, 20 bp, synthetic construct
  source 1..20: mol_type = other DNA
cgactactgcctctccctta

SEQ ID NO: 8117 - DNA, 20 bp, synthetic construct
  source 1..20: mol_type = other DNA
ctaggaccccttctcgtgtt

SEQ ID NO: 8118 - DNA, 20 bp, synthetic construct
  source 1..20: mol_type = other DNA
acaagaatcctcacaatacc

SEQ ID NO: 8119 - DNA, 20 bp, synthetic construct
  source 1..20: mol_type = other DNA
tcgctggatgtgtctgcggc

SEQ ID NO: 8120 - DNA, 20 bp, synthetic construct
  source 1..20: mol_type = other DNA
ttctggactatcaaggtatg

SEQ ID NO: 8121 - DNA, 20 bp, synthetic construct
  source 1..20: mol_type = other DNA
gtcctctaattccaggatcc

SEQ ID NO: 8122 - DNA, 20 bp, synthetic construct
  source 1..20: mol_type = other DNA
caggatcctcaaccaccagc

SEQ ID NO: 8123 - DNA, 20 bp, synthetic construct
  source 1..20: mol_type = other DNA
cacctgtattcccatcccat

SEQ ID NO: 8124 - DNA, 20 bp, synthetic construct
  source 1..20: mol_type = other DNA
ccatcccatcatcctgggct

SEQ ID NO: 8125 - DNA, 20 bp, synthetic construct
  source 1..20: mol_type = other DNA
ctatgggagtgggcctcagc

SEQ ID NO: 8126 - DNA, 20 bp, synthetic construct
  source 1..20: mol_type = other DNA
gttcagtggttcgtagggct

SEQ ID NO: 8127 - DNA, 20 bp, synthetic construct
  source 1..20: mol_type = other DNA
ggctttcagttatatggatg

SEQ ID NO: 8128 - DNA, 20 bp, synthetic construct
  source 1..20: mol_type = other DNA
ggggccaagtctgtacagca

SEQ ID NO: 8129 - DNA, 20 bp, synthetic construct
  source 1..20: mol_type = other DNA
aaaccctaacaaaacaaaga

SEQ ID NO: 8130 - DNA, 20 bp, synthetic construct
  source 1..20: mol_type = other DNA
ctctctgaattttatgggtt

SEQ ID NO: 8131 - DNA, 20 bp, synthetic construct
  source 1..20: mol_type = other DNA
tatgggttatgtcattggaa

SEQ ID NO: 8132 - DNA, 20 bp, synthetic construct
  source 1..20: mol_type = other DNA
tgtcattggaagttatgggt

SEQ ID NO: 8133 - DNA, 20 bp, synthetic construct
  source 1..20: mol_type = other DNA
acaggcctattgattggaaa

SEQ ID NO: 8134 - DNA, 20 bp, synthetic construct
  source 1..20: mol_type = other DNA
attggaaagtatgtcaacga

SEQ ID NO: 8135 - DNA, 20 bp, synthetic construct
  source 1..20: mol_type = other DNA
acacaatgtggttatcctgc

SEQ ID NO: 8136 - DNA, 20 bp, synthetic construct
  source 1..20: mol_type = other DNA
aatctaagcaggctttcact

SEQ ID NO: 8137 - DNA, 20 bp, synthetic construct
  source 1..20: mol_type = other DNA
gctgacgcaacccccactgg

SEQ ID NO: 8138 - DNA, 20 bp, synthetic construct
  source 1..20: mol_type = other DNA
tcgggactgataactctgtt

SEQ ID NO: 8139 - DNA, 20 bp, synthetic construct
  source 1..20: mol_type = other DNA
cgaccgaccacggggcgcac

SEQ ID NO: 8140 - DNA, 20 bp, synthetic construct
  source 1..20: mol_type = other DNA
cccaaggtcttacataagag

SEQ ID NO: 8141 - DNA, 20 bp, synthetic construct
  source 1..20: mol_type = other DNA
ggggaggagattagattaaa

SEQ ID NO: 8142 - DNA, 20 bp, synthetic construct
  source 1..20: mol_type = other DNA
atgtcctactgttcaagcct

SEQ ID NO: 8143 - DNA, 20 bp, synthetic construct
  source 1..20: mol_type = other DNA
ggagctactgtggagttact

SEQ ID NO: 8144 - DNA, 20 bp, synthetic construct
  source 1..20: mol_type = other DNA
ttcacctcaccatactgcac

SEQ ID NO: 8145 - DNA, 20 bp, synthetic construct
  source 1..20: mol_type = other DNA
ggaagatccagcatctagag

SEQ ID NO: 8146 - DNA, 20 bp, synthetic construct
  source 1..20: mol_type = other DNA
aggcaactcttgtggtttca

SEQ ID NO: 8147 - DNA, 20 bp, synthetic construct
  source 1..20: mol_type = other DNA
ttagacgacgaggcaggtcc

SEQ ID NO: 8148 - DNA, 20 bp, synthetic construct
  source 1..20: mol_type = other DNA
cttggactcataaggtgggg

SEQ ID NO: 8149 - DNA, 20 bp, synthetic construct
  source 1..20: mol_type = other DNA
ttctactgtacctgtcttta

SEQ ID NO: 8150 - DNA, 20 bp, synthetic construct
  source 1..20: mol_type = other DNA
gaaaacaccatcttttccta

SEQ ID NO: 8151 - DNA, 20 bp, synthetic construct
  source 1..20: mol_type = other DNA
acaccaagacattatcaaaa

SEQ ID NO: 8152 - DNA, 20 bp, synthetic construct
  source 1..20: mol_type = other DNA
tcaaaaaatgtgaacagttt

SEQ ID NO: 8153 - DNA, 20 bp, synthetic construct
  source 1..20: mol_type = other DNA
atgagaaaagaagattgcaa

SEQ ID NO: 8154 - DNA, 20 bp, synthetic construct
  source 1..20: mol_type = other DNA
caattgattatgcctgctag

SEQ ID NO: 8155 - DNA, 20 bp, synthetic construct
  source 1..20: mol_type = other DNA
tatccaaaggttaccaaata

SEQ ID NO: 8156 - DNA, 20 bp, synthetic construct
  source 1..20: mol_type = other DNA
accattggataagggtatta

SEQ ID NO: 8157 - DNA, 20 bp, synthetic construct
  source 1..20: mol_type = other DNA
gataagggtattaaacctta

SEQ ID NO: 8158 - DNA, 20 bp, synthetic construct
  source 1..20: mol_type = other DNA
aaccttattatccagaacat

SEQ ID NO: 8159 - DNA, 20 bp, synthetic construct
  source 1..20: mol_type = other DNA
tccagaacatctagttaatc

SEQ ID NO: 8160 - DNA, 20 bp, synthetic construct
  source 1..20: mol_type = other DNA
atcattacttccaaactaga

SEQ ID NO: 8161 - DNA, 20 bp, synthetic construct
  source 1..20: mol_type = other DNA
cttccaaactagacactatt

SEQ ID NO: 8162 - DNA, 20 bp, synthetic construct
  source 1..20: mol_type = other DNA
acacactctatggaaggcgg

SEQ ID NO: 8163 - DNA, 20 bp, synthetic construct
  source 1..20: mol_type = other DNA
ttgggaacaagatctacagc

SEQ ID NO: 8164 - DNA, 20 bp, synthetic construct
  source 1..20: mol_type = other DNA
tttcccgaccaccagttgga

SEQ ID NO: 8165 - DNA, 20 bp, synthetic construct
  source 1..20: mol_type = other DNA
gatccagccttcagagcaaa

SEQ ID NO: 8166 - DNA, 20 bp, synthetic construct
  source 1..20: mol_type = other DNA
ggacttcaatcccaacaagg

SEQ ID NO: 8167 - DNA, 20 bp, synthetic construct
  source 1..20: mol_type = other DNA
caccccaccgcacggaggcc

SEQ ID NO: 8168 - DNA, 20 bp, synthetic construct
  source 1..20: mol_type = other DNA
ctcaaaggtggagacagcgg

SEQ ID NO: 8169 - DNA, 20 bp, synthetic construct
  source 1..20: mol_type = other DNA
gctggcaaagtttgtagtat

SEQ ID NO: 8170 - DNA, 20 bp, synthetic construct
  source 1..20: mol_type = other DNA
ggattgaagtcccaatctgg

SEQ ID NO: 8171 - DNA, 20 bp, synthetic construct
  source 1..20: mol_type = other DNA
aagtcccaatctggatttgc

SEQ ID NO: 8172 - DNA, 20 bp, synthetic construct
  source 1..20: mol_type = other DNA
gctctgaaggctggatccaa

SEQ ID NO: 8173 - DNA, 20 bp, synthetic construct
  source 1..20: mol_type = other DNA
ctggtggaaagattctgccc

SEQ ID NO: 8174 - DNA, 20 bp, synthetic construct
  source 1..20: mol_type = other DNA
tgccccatgctgtagatctt

SEQ ID NO: 8175 - DNA, 20 bp, synthetic construct
  source 1..20: mol_type = other DNA
ctctcttatataatataccc

SEQ ID NO: 8176 - DNA, 20 bp, synthetic construct
  source 1..20: mol_type = other DNA
ggaagtaatgattaactaga

SEQ ID NO: 8177 - DNA, 20 bp, synthetic construct
  source 1..20: mol_type = other DNA
tggataataaggtttaatac

SEQ ID NO: 8178 - DNA, 20 bp, synthetic construct
  source 1..20: mol_type = other DNA
actgtaagtgggcctacaaa

SEQ ID NO: 8179 - DNA, 20 bp, synthetic construct
  source 1..20: mol_type = other DNA
tttgataatgtcttggtgta

SEQ ID NO: 8180 - DNA, 20 bp, synthetic construct
  source 1..20: mol_type = other DNA
ggaaaagatggtgttttcca

SEQ ID NO: 8181 - DNA, 20 bp, synthetic construct
  source 1..20: mol_type = other DNA
tccaatgaggattaaagaca

SEQ ID NO: 8182 - DNA, 20 bp, synthetic construct
  source 1..20: mol_type = other DNA
aagacaggtacagtagaaga

SEQ ID NO: 8183 - DNA, 20 bp, synthetic construct
  source 1..20: mol_type = other DNA
cccaccttatgagtccaagg

SEQ ID NO: 8184 - DNA, 20 bp, synthetic construct
  source 1..20: mol_type = other DNA
ccgagattgagatcttctgc

SEQ ID NO: 8185 - DNA, 20 bp, synthetic construct
  source 1..20: mol_type = other DNA
ttcttctaggggacctgcct

SEQ ID NO: 8186 - DNA, 20 bp, synthetic construct
  source 1..20: mol_type = other DNA
ataggataggggcatttggt

SEQ ID NO: 8187 - DNA, 20 bp, synthetic construct
  source 1..20: mol_type = other DNA
ggtggtctataagctggagg

SEQ ID NO: 8188 - DNA, 20 bp, synthetic construct
  source 1..20: mol_type = other DNA
acataactgactactaggtc

SEQ ID NO: 8189 - DNA, 20 bp, synthetic construct
  source 1..20: mol_type = other DNA
acacccacccaggtagctag

SEQ ID NO: 8190 - DNA, 20 bp, synthetic construct
  source 1..20: mol_type = other DNA
cccccagcaaagaattgctt

SEQ ID NO: 8191 - DNA, 20 bp, synthetic construct
  source 1..20: mol_type = other DNA
ggcagaggtgaaaaagttgc

SEQ ID NO: 8192 - DNA, 20 bp, synthetic construct
  source 1..20: mol_type = other DNA
acattgcagagagtccaaga

SEQ ID NO: 8193 - DNA, 20 bp, synthetic construct
  source 1..20: mol_type = other DNA
cagagagtccaagagtcctc

SEQ ID NO: 8194 - DNA, 20 bp, synthetic construct
  source 1..20: mol_type = other DNA
gcgggagaggacaacagagt

SEQ ID NO: 8195 - DNA, 20 bp, synthetic construct
  source 1..20: mol_type = other DNA
cacgcacgcgctgatggccc

SEQ ID NO: 8196 - DNA, 20 bp, synthetic construct
  source 1..20: mol_type = other DNA
ccgggcaacggggtaaaggt

SEQ ID NO: 8197 - DNA, 20 bp, synthetic construct
  source 1..20: mol_type = other DNA
acacagaaaggccttgtaag

SEQ ID NO: 8198 - DNA, 20 bp, synthetic construct
  source 1..20: mol_type = other DNA
gcgagaaagtgaaagcctgc

SEQ ID NO: 8199 - DNA, 20 bp, synthetic construct
  source 1..20: mol_type = other DNA
aatacatgcatacaagggca

SEQ ID NO: 8200 - DNA, 20 bp, synthetic construct
  source 1..20: mol_type = other DNA
acgcaggataaccacattgt

SEQ ID NO: 8201 - DNA, 20 bp, synthetic construct
  source 1..20: mol_type = other DNA
tgtaaatggggcagcaaaac

SEQ ID NO: 8202 - DNA, 20 bp, synthetic construct
  source 1..20: mol_type = other DNA
gttgacatactttccaatca

SEQ ID NO: 8203 - DNA, 20 bp, synthetic construct
  source 1..20: mol_type = other DNA
acatactttccaatcaatag

SEQ ID NO: 8204 - DNA, 20 bp, synthetic construct
  source 1..20: mol_type = other DNA
ataggaagttttctaaaaca

SEQ ID NO: 8205 - DNA, 20 bp, synthetic construct
  source 1..20: mol_type = other DNA
tctaaaacattctttgattt

SEQ ID NO: 8206 - DNA, 20 bp, synthetic construct
  source 1..20: mol_type = other DNA
tttgattttttgtatgatgt

SEQ ID NO: 8207 - DNA, 20 bp, synthetic construct
  source 1..20: mol_type = other DNA
ttgtggcaaggacccataac

SEQ ID NO: 8208 - DNA, 20 bp, synthetic construct
  source 1..20: mol_type = other DNA
agagagtaaccccatctctt

SEQ ID NO: 8209 - DNA, 20 bp, synthetic construct
  source 1..20: mol_type = other DNA
tgttagggtttaaatgtata

SEQ ID NO: 8210 - DNA, 20 bp, synthetic construct
  source 1..20: mol_type = other DNA
gtaacagcggtaaaaaggga

SEQ ID NO: 8211 - DNA, 20 bp, synthetic construct
  source 1..20: mol_type = other DNA
ccgtccgaaggtttggtaca

SEQ ID NO: 8212 - DNA, 20 bp, synthetic construct
  source 1..20: mol_type = other DNA
ggtacagcaacaggagggat

SEQ ID NO: 8213 - DNA, 20 bp, synthetic construct
  source 1..20: mol_type = other DNA
cttgagcagtagtcatgcag

SEQ ID NO: 8214 - DNA, 20 bp, synthetic construct
  source 1..20: mol_type = other DNA
gaggacaaacgggcaacata

SEQ ID NO: 8215 - DNA, 20 bp, synthetic construct
  source 1..20: mol_type = other DNA
gtgagtgattggaggttggg

SEQ ID NO: 8216 - DNA, 20 bp, synthetic construct
  source 1..20: mol_type = other DNA
tggccaagacacacggtagt

SEQ ID NO: 8217 - DNA, 20 bp, synthetic construct
  source 1..20: mol_type = other DNA
cccctagaaaattgagagaa

SEQ ID NO: 8218 - DNA, 20 bp, synthetic construct
  source 1..20: mol_type = other DNA
ttgtcaacaagaaaaacccc

SEQ ID NO: 8219 - DNA, 20 bp, synthetic construct
  source 1..20: mol_type = other DNA
acgataagggagaggcagta

SEQ ID NO: 8220 - RNA, 20 nt, synthetic construct
  source 1..20: mol_type = other RNA
aaaaaatcaaagaatgtttt

SEQ ID NO: 8221 - RNA, 20 nt, synthetic construct
  source 1..20: mol_type = other RNA
aaaaaatgtgaacagtttgt

SEQ ID NO: 8222 - RNA, 20 nt, synthetic construct
  source 1..20: mol_type = other RNA
aaaaaccccgcctgtaacac

SEQ ID NO: 8223 - RNA, 20 nt, synthetic construct
  source 1..20: mol_type = other RNA
aaaaagttgcatggtgctgg

SEQ ID NO: 8224 - RNA, 20 nt, synthetic construct
  source 1..20: mol_type = other RNA
aaaaatcaaagaatgtttta

SEQ ID NO: 8225 - RNA, 20 nt, synthetic construct
  source 1..20: mol_type = other RNA
aaaaatgtgaacagtttgta

SEQ ID NO: 8226 - RNA, 21 nt, synthetic construct
  source 1..21: mol_type = other RNA
aaaacaagcggctaggagttc

SEQ ID NO: 8227 - RNA, 21 nt, synthetic construct
  source 1..21: mol_type = other RNA
aaaacattctttgattttttg

SEQ ID NO: 8228 - RNA, 20 nt, synthetic construct
  source 1..20: mol_type = other RNA
aaaaccccgcctgtaacacg

SEQ ID NO: 8229 - RNA, 20 nt, synthetic construct
  source 1..20: mol_type = other RNA
aaaacgccgcagacacatcc

SEQ ID NO: 8230 - RNA, 20 nt, synthetic construct
  source 1..20: mol_type = other RNA
aaaagatggtgttttccaat

SEQ ID NO: 8231 - RNA, 20 nt, synthetic construct
  source 1..20: mol_type = other RNA
aaaaggttccacgcacgcgc

SEQ ID NO: 8232 - RNA, 20 nt, synthetic construct
  source 1..20: mol_type = other RNA
aaaagtgagacaagaaatgt

SEQ ID NO: 8233 - RNA, 20 nt, synthetic construct
  source 1..20: mol_type = other RNA
aaaatcaaagaatgttttag

SEQ ID NO: 8234 - RNA, 20 nt, synthetic construct
  source 1..20: mol_type = other RNA
aaaattggtaacagcggtaa

SEQ ID NO: 8235 - RNA, 20 nt, synthetic construct
  source 1..20: mol_type = other RNA
aaacaaaggacgtcccgcgc

SEQ ID NO: 8236 - RNA, 20 nt, synthetic construct
  source 1..20: mol_type = other RNA
aaacaagcggctaggagttc

SEQ ID NO: 8237 - RNA, 20 nt, synthetic construct
  source 1..20: mol_type = other RNA
aaacacagcaaatccagatt

SEQ ID NO: 8238 - RNA, 20 nt, synthetic construct
  source 1..20: mol_type = other RNA
aaacactcatcctcaggcca

SEQ ID NO: 8239 - RNA, 20 nt, synthetic construct
  source 1..20: mol_type = other RNA
aaacccagcccgaatgctcc

SEQ ID NO: 8240 - RNA, 20 nt, synthetic construct
  source 1..20: mol_type = other RNA
aaaccccgcctgtaacacga

SEQ ID NO: 8241 - RNA, 20 nt, synthetic construct
  source 1..20: mol_type = other RNA
aaacgagagtaactccacag

SEQ ID NO: 8242 - RNA, 20 nt, synthetic construct
  source 1..20: mol_type = other RNA
aaacgggcaacataccttga

SEQ ID NO: 8243 - RNA, 20 nt, synthetic construct
  source 1..20: mol_type = other RNA
aaactactgttgttagacga

SEQ ID NO: 8244 - RNA, 20 nt, synthetic construct
  source 1..20: mol_type = other RNA
aaactgagccaggagaaacg

SEQ ID NO: 8245 - RNA, 20 nt, synthetic construct
  source 1..20: mol_type = other RNA
aaactgttcacattttttga

SEQ ID NO: 8246 - RNA, 21 nt, synthetic construct
  source 1..21: mol_type = other RNA
aaacttcctattaacaggcct

SEQ ID NO: 8247 - RNA, 20 nt, synthetic construct
  source 1..20: mol_type = other RNA
aaagaatcccagaggattgc

SEQ ID NO: 8248 - RNA, 20 nt, synthetic construct
  source 1..20: mol_type = other RNA
aaagaatttggagctactgt

SEQ ID NO: 8249 - RNA, 20 nt, synthetic construct
  source 1..20: mol_type = other RNA
aaagactgggaggagttggg

SEQ ID NO: 8250 - RNA, 20 nt, synthetic construct
  source 1..20: mol_type = other RNA
aaagagatggggttactctc

SEQ ID NO: 8251 - RNA, 20 nt, synthetic construct
  source 1..20: mol_type = other RNA
aaagatggtgttttccaatg

SEQ ID NO: 8252 - RNA, 20 nt, synthetic construct
  source 1..20: mol_type = other RNA
aaagattctgccccatgctg

SEQ ID NO: 8253 - RNA, 20 nt, synthetic construct
  source 1..20: mol_type = other RNA
aaagccaaacagtgggggaa

SEQ ID NO: 8254 - RNA, 20 nt, synthetic construct
  source 1..20: mol_type = other RNA
aaagcccaggatgatgggat

SEQ ID NO: 8255 - RNA, 20 nt, synthetic construct
  source 1..20: mol_type = other RNA
aaaggccttgtaagttggcg

SEQ ID NO: 8256 - RNA, 21 nt, synthetic construct
  source 1..21: mol_type = other RNA
aaaggccttgtaagttggcga

SEQ ID NO: 8257 - RNA, 20 nt, synthetic construct
  source 1..20: mol_type = other RNA
aaaggtggagacagcggggt

SEQ ID NO: 8258 - RNA, 20 nt, synthetic construct
  source 1..20: mol_type = other RNA
aaagtatgtcaacgaattgt

SEQ ID NO: 8259 - RNA, 20 nt, synthetic construct
  source 1..20: mol_type = other RNA
aaagtgagacaagaaatgtg

SEQ ID NO: 8260 - RNA, 20 nt, synthetic construct
  source 1..20: mol_type = other RNA
aaagttgcatggtgctggtg

SEQ ID NO: 8261 - RNA, 20 nt, synthetic construct
  source 1..20: mol_type = other RNA
aaagtttgtagtatgccctg

SEQ ID NO: 8262 - RNA, 20 nt, synthetic construct
  source 1..20: mol_type = other RNA
aaatacaggcctctcactct

SEQ ID NO: 8263 - RNA, 20 nt, synthetic construct
  source 1..20: mol_type = other RNA
aaatatttaccattggataa

SEQ ID NO: 8264 - RNA, 20 nt, synthetic construct
  source 1..20: mol_type = other RNA
aaatcaaagaatgttttaga

SEQ ID NO: 8265 - RNA, 20 nt, synthetic construct
  source 1..20: mol_type = other RNA
aaatggggcagcaaaaccca

SEQ ID NO: 8266 - RNA, 20 nt, synthetic construct
  source 1..20: mol_type = other RNA
aaatgtatacccaaagacaa

SEQ ID NO: 8267 - RNA, 20 nt, synthetic construct
  source 1..20: mol_type = other RNA
aaatgtatattaggaaaaga

SEQ ID NO: 8268 - RNA, 20 nt, synthetic construct
  source 1..20: mol_type = other RNA
aaatgtgaaaccacaagagt

SEQ ID NO: 8269 - RNA, 20 nt, synthetic construct
  source 1..20: mol_type = other RNA
aaattaacacccacccaggt

SEQ ID NO: 8270 - RNA, 20 nt, synthetic construct
  source 1..20: mol_type = other RNA
aaattgagagaagtccacca

SEQ ID NO: 8271 - RNA, 20 nt, synthetic construct
  source 1..20: mol_type = other RNA
aaattggtaacagcggtaaa

SEQ ID NO: 8272 - RNA, 20 nt, synthetic construct
  source 1..20: mol_type = other RNA
aacaaacagtctttgaagta

SEQ ID NO: 8273 - RNA, 20 nt, synthetic construct
  source 1..20: mol_type = other RNA
aacaaaggacgtcccgcgca

SEQ ID NO: 8274 - RNA, 20 nt, synthetic construct
  source 1..20: mol_type = other RNA
aacaaatggcactagtaaac

SEQ ID NO: 8275 - RNA, 20 nt, synthetic construct
  source 1..20: mol_type = other RNA
aacaagaaaaaccccgcctg

SEQ ID NO: 8276 - RNA, 20 nt, synthetic construct
  source 1..20: mol_type = other RNA
aacaagaagatgaggcatag

SEQ ID NO: 8277 - RNA, 20 nt, synthetic construct
  source 1..20: mol_type = other RNA
aacaagagatgattaggcag

SEQ ID NO: 8278 - RNA, 21 nt, synthetic construct
  source 1..21: mol_type = other RNA
aacaagatctacagcatgggg

SEQ ID NO: 8279 - RNA, 20 nt, synthetic construct
  source 1..20: mol_type = other RNA
aacaaggacacctggccaga

SEQ ID NO: 8280 - RNA, 20 nt, synthetic construct
  source 1..20: mol_type = other RNA
aacaatgctcaggagactct

SEQ ID NO: 8281 - RNA, 20 nt, synthetic construct
  source 1..20: mol_type = other RNA
aacacagcaaatccagattg

SEQ ID NO: 8282 - RNA, 20 nt, synthetic construct
  source 1..20: mol_type = other RNA
aacacatcatacaaaaaatc

SEQ ID NO: 8283 - RNA, 21 nt, synthetic construct
  source 1..21: mol_type = other RNA
aacacatcatacaaaaaatca

SEQ ID NO: 8284 - RNA, 20 nt, synthetic construct
  source 1..20: mol_type = other RNA
aacacccacccaggtagcta

SEQ ID NO: 8285 - RNA, 20 nt, synthetic construct
  source 1..20: mol_type = other RNA
aacacgagaaggggtcctag

SEQ ID NO: 8286 - RNA, 20 nt, synthetic construct
  source 1..20: mol_type = other RNA
aacagagttatcagtcccga

SEQ ID NO: 8287 - RNA, 20 nt, synthetic construct
  source 1..20: mol_type = other RNA
aacagcggtaaaaagggact

SEQ ID NO: 8288 - RNA, 20 nt, synthetic construct
  source 1..20: mol_type = other RNA
aacagtaggacatgaacaag

SEQ ID NO: 8289 - RNA, 21 nt, synthetic construct
  source 1..21: mol_type = other RNA
aacagtaggacatgaacaaga

SEQ ID NO: 8290 - RNA, 21 nt, synthetic construct
  source 1..21: mol_type = other RNA
aacagtctttgaagtatgcct

SEQ ID NO: 8291 - RNA, 20 nt, synthetic construct
  source 1..20: mol_type = other RNA
aacagtgggggaaagcccta

SEQ ID NO: 8292 - RNA, 20 nt, synthetic construct
  source 1..20: mol_type = other RNA
aacataccttgatagtccag

SEQ ID NO: 8293 - RNA, 20 nt, synthetic construct
  source 1..20: mol_type = other RNA
aacatcacatcaggattcct

SEQ ID NO: 8294 - RNA, 20 nt, synthetic construct
  source 1..20: mol_type = other RNA
aacatggagaacatcacatc

SEQ ID NO: 8295 - RNA, 20 nt, synthetic construct
  source 1..20: mol_type = other RNA
aacattgaggttcccgagat

SEQ ID NO: 8296 - RNA, 20 nt, synthetic construct
  source 1..20: mol_type = other RNA
aaccactgaacaaatggcac

SEQ ID NO: 8297 - RNA, 20 nt, synthetic construct
  source 1..20: mol_type = other RNA
aaccaggacaagttggagga

SEQ ID NO: 8298 - RNA, 20 nt, synthetic construct
  source 1..20: mol_type = other RNA
aacccataaaattcagagag

SEQ ID NO: 8299 - RNA, 21 nt, synthetic construct
  source 1..21: mol_type = other RNA
aaccccatctctttgttttgt

SEQ ID NO: 8300 - RNA, 20 nt, synthetic construct
  source 1..20: mol_type = other RNA
aacccccactggctggggct

SEQ ID NO: 8301 - RNA, 20 nt, synthetic construct
  source 1..20: mol_type = other RNA
aaccccgcctgtaacacgag

SEQ ID NO: 8302 - RNA, 21 nt, synthetic construct
  source 1..21: mol_type = other RNA
aaccccgcctgtaacacgaga

SEQ ID NO: 8303 - RNA, 21 nt, synthetic construct
  source 1..21: mol_type = other RNA
aaccctaacaaaacaaagaga

SEQ ID NO: 8304 - RNA, 21 nt, synthetic construct
  source 1..21: mol_type = other RNA
aacctagcaggcataatcaat

SEQ ID NO: 8305 - RNA, 20 nt, synthetic construct
  source 1..20: mol_type = other RNA
aacctgcatgactactgctc

SEQ ID NO: 8306 - RNA, 20 nt, synthetic construct
  source 1..20: mol_type = other RNA
aacctttcaccaaactctgc

SEQ ID NO: 8307 - RNA, 20 nt, synthetic construct
  source 1..20: mol_type = other RNA
aacctttggataaaacctag

SEQ ID NO: 8308 - RNA, 20 nt, synthetic construct
  source 1..20: mol_type = other RNA
aaccttttcggctcctctgc

SEQ ID NO: 8309 - RNA, 20 nt, synthetic construct
  source 1..20: mol_type = other RNA
aacgagagtaactccacagt

SEQ ID NO: 8310 - RNA, 21 nt, synthetic construct
  source 1..21: mol_type = other RNA
aacgcaggataaccacattgt

SEQ ID NO: 8311 - RNA, 20 nt, synthetic construct
  source 1..20: mol_type = other RNA
aacgcccaccgaatgttgcc

SEQ ID NO: 8312 - RNA, 20 nt, synthetic construct
  source 1..20: mol_type = other RNA
aacgccgcagacacatccag

SEQ ID NO: 8313 - RNA, 20 nt, synthetic construct
  source 1..20: mol_type = other RNA
aacggtttctcttccaaaag

SEQ ID NO: 8314 - RNA, 20 nt, synthetic construct
  source 1..20: mol_type = other RNA
aactaatgactctagctacc

SEQ ID NO: 8315 - RNA, 20 nt, synthetic construct
  source 1..20: mol_type = other RNA
aactaccgtgtgtcttggcc

SEQ ID NO: 8316 - RNA, 20 nt, synthetic construct
  source 1..20: mol_type = other RNA
aactactgttgttagacgac

SEQ ID NO: 8317 - RNA, 20 nt, synthetic construct
  source 1..20: mol_type = other RNA
aactagatgttctggataat

SEQ ID NO: 8318 - RNA, 20 nt, synthetic construct
  source 1..20: mol_type = other RNA
aactccctcgcctcgcagac

SEQ ID NO: 8319 - RNA, 20 nt, synthetic construct
  source 1..20: mol_type = other RNA
aactcctcccagtctttaaa

SEQ ID NO: 8320 - RNA, 20 nt, synthetic construct
  source 1..20: mol_type = other RNA
aactctgcaagatcccagag

SEQ ID NO: 8321 - RNA, 20 nt, synthetic construct
  source 1..20: mol_type = other RNA
aactctgttgtcctctcccg

SEQ ID NO: 8322 - RNA, 20 nt, synthetic construct
  source 1..20: mol_type = other RNA
aactgaaagccaaacagtgg

SEQ ID NO: 8323 - RNA, 20 nt, synthetic construct
  source 1..20: mol_type = other RNA
aactggagccaccagcaggg

SEQ ID NO: 8324 - RNA, 21 nt, synthetic construct
  source 1..21: mol_type = other RNA
aacttccaatgacataaccca

SEQ ID NO: 8325 - RNA, 20 nt, synthetic construct
  source 1..20: mol_type = other RNA
aacttgtcctggttatcgct

SEQ ID NO: 8326 - RNA, 20 nt, synthetic construct
  source 1..20: mol_type = other RNA
aagaaaattggtaacagcgg

SEQ ID NO: 8327 - RNA, 20 nt, synthetic construct
  source 1..20: mol_type = other RNA
aagaaccaacaagaagatga

SEQ ID NO: 8328 - RNA, 20 nt, synthetic construct
  source 1..20: mol_type = other RNA
aagaagatgaggcatagcag

SEQ ID NO: 8329 - RNA, 20 nt, synthetic construct
  source 1..20: mol_type = other RNA
aagaagattgcaattgatta

SEQ ID NO: 8330 - RNA, 20 nt, synthetic construct
  source 1..20: mol_type = other RNA
aagaagtcagaaggcaaaaa

SEQ ID NO: 8331 - RNA, 21 nt, synthetic construct
  source 1..21: mol_type = other RNA
aagaagtcagaaggcaaaaac

SEQ ID NO: 8332 - RNA, 20 nt, synthetic construct
  source 1..20: mol_type = other RNA
aagaatcctcacaataccgc

SEQ ID NO: 8333 - RNA, 20 nt, synthetic construct
  source 1..20: mol_type = other RNA
aagaattgcttgcctgagtg

SEQ ID NO: 8334 - RNA, 20 nt, synthetic construct
  source 1..20: mol_type = other RNA
aagaatttggagctactgtg

SEQ ID NO: 8335 - RNA, 20 nt, synthetic construct
  source 1..20: mol_type = other RNA
aagacattatcaaaaaatgt

SEQ ID NO: 8336 - RNA, 21 nt, synthetic construct
  source 1..21: mol_type = other RNA
aagacattatcaaaaaatgtg

SEQ ID NO: 8337 - RNA, 20 nt, synthetic construct
  source 1..20: mol_type = other RNA
aagactgggaggagttgggg

SEQ ID NO: 8338 - RNA, 20 nt, synthetic construct
  source 1..20: mol_type = other RNA
aagactgtttgtttaaagac

SEQ ID NO: 8339 - RNA, 21 nt, synthetic construct
  source 1..21: mol_type = other RNA
aagagaaaccgttatagagta

SEQ ID NO: 8340 - RNA, 20 nt, synthetic construct
  source 1..20: mol_type = other RNA
aagagagaaacaacacatag

SEQ ID NO: 8341 - RNA, 20 nt, synthetic construct
  source 1..20: mol_type = other RNA
aagagatgattaggcagagg

SEQ ID NO: 8342 - RNA, 20 nt, synthetic construct
  source 1..20: mol_type = other RNA
aagagatggggttactctct

SEQ ID NO: 8343 - RNA, 20 nt, synthetic construct
  source 1..20: mol_type = other RNA
aagaggactcttggactctc

SEQ ID NO: 8344 - RNA, 20 nt, synthetic construct
  source 1..20: mol_type = other RNA
aagatctacagcatggggca

SEQ ID NO: 8345 - RNA, 20 nt, synthetic construct
  source 1..20: mol_type = other RNA
aagatctcgtactgaaggaa

SEQ ID NO: 8346 - RNA, 20 nt, synthetic construct
  source 1..20: mol_type = other RNA
aagatggtgttttccaatga

SEQ ID NO: 8347 - RNA, 20 nt, synthetic construct
  source 1..20: mol_type = other RNA
aagattctgccccatgctgt

SEQ ID NO: 8348 - RNA, 20 nt, synthetic construct
  source 1..20: mol_type = other RNA
aagattgacgataagggaga

SEQ ID NO: 8349 - RNA, 20 nt, synthetic construct
  source 1..20: mol_type = other RNA
aagcaattctttgctggggg

SEQ ID NO: 8350 - RNA, 20 nt, synthetic construct
  source 1..20: mol_type = other RNA
aagccacccaaggcacagct

SEQ ID NO: 8351 - RNA, 20 nt, synthetic construct
  source 1..20: mol_type = other RNA
aagcccaggatgatgggatg

SEQ ID NO: 8352 - RNA, 20 nt, synthetic construct
  source 1..20: mol_type = other RNA
aagccccagccagtgggggt

SEQ ID NO: 8353 - RNA, 20 nt, synthetic construct
  source 1..20: mol_type = other RNA
aagccctacgaaccactgaa

SEQ ID NO: 8354 - RNA, 20 nt, synthetic construct
  source 1..20: mol_type = other RNA
aagcctccaagctgtgcctt

SEQ ID NO: 8355 - RNA, 20 nt, synthetic construct
  source 1..20: mol_type = other RNA
aagcgaagtgcacacggtcc

SEQ ID NO: 8356 - RNA, 21 nt, synthetic construct
  source 1..21: mol_type = other RNA
aagcgaagtgcacacggtccg

SEQ ID NO: 8357 - RNA, 20 nt, synthetic construct
  source 1..20: mol_type = other RNA
aaggaaagaagtcagaaggc

SEQ ID NO: 8358 - RNA, 20 nt, synthetic construct
  source 1..20: mol_type = other RNA
aaggacacctggccagacgc

SEQ ID NO: 8359 - RNA, 20 nt, synthetic construct
  source 1..20: mol_type = other RNA
aaggcacagcttggaggctt

SEQ ID NO: 8360 - RNA, 21 nt, synthetic construct
  source 1..21: mol_type = other RNA
aaggcacagcttggaggcttg

SEQ ID NO: 8361 - RNA, 20 nt, synthetic construct
  source 1..20: mol_type = other RNA
aaggcctccgtgcggtgggg

SEQ ID NO: 8362 - RNA, 20 nt, synthetic construct
  source 1..20: mol_type = other RNA
aaggccttgtaagttggcga

SEQ ID NO: 8363 - RNA, 20 nt, synthetic construct
  source 1..20: mol_type = other RNA
aaggcgggtatattatataa

SEQ ID NO: 8364 - RNA, 20 nt, synthetic construct
  source 1..20: mol_type = other RNA
aaggcttcccgatacagagc

SEQ ID NO: 8365 - RNA, 20 nt, synthetic construct
  source 1..20: mol_type = other RNA
aagggactcaagatgctgta

SEQ ID NO: 8366 - RNA, 20 nt, synthetic construct
  source 1..20: mol_type = other RNA
aaggggacgagagagtccca

SEQ ID NO: 8367 - RNA, 21 nt, synthetic construct
  source 1..21: mol_type = other RNA
aaggggtcctaggaatcctga

SEQ ID NO: 8368 - RNA, 20 nt, synthetic construct
  source 1..20: mol_type = other RNA
aagggtcgatgtccatgccc

SEQ ID NO: 8369 - RNA, 20 nt, synthetic construct
  source 1..20: mol_type = other RNA
aagggtcgtccgcaggattc

SEQ ID NO: 8370 - RNA, 20 nt, synthetic construct
  source 1..20: mol_type = other RNA
aaggtaggagctggagcatt

SEQ ID NO: 8371 - RNA, 20 nt, synthetic construct
  source 1..20: mol_type = other RNA
aaggtcggtcgttgacattg

SEQ ID NO: 8372 - RNA, 20 nt, synthetic construct
  source 1..20: mol_type = other RNA
aaggtggagacagcggggta

SEQ ID NO: 8373 - RNA, 21 nt, synthetic construct
  source 1..21: mol_type = other RNA
aaggttaccaaatatttacca

SEQ ID NO: 8374 - RNA, 20 nt, synthetic construct
  source 1..20: mol_type = other RNA
aaggtttggtacagcaacag

SEQ ID NO: 8375 - RNA, 21 nt, synthetic construct
  source 1..21: mol_type = other RNA
aaggtttggtacagcaacagg

SEQ ID NO: 8376 - RNA, 20 nt, synthetic construct
  source 1..20: mol_type = other RNA
aagtcagaaggcaaaaacga

SEQ ID NO: 8377 - RNA, 20 nt, synthetic construct
  source 1..20: mol_type = other RNA
aagtgaaagcctgcttagat

SEQ ID NO: 8378 - RNA, 20 nt, synthetic construct
  source 1..20: mol_type = other RNA
aagttatgggtccttgccac

SEQ ID NO: 8379 - RNA, 21 nt, synthetic construct
  source 1..21: mol_type = other RNA
aagttggaggacaggaggttg

SEQ ID NO: 8380 - RNA, 20 nt, synthetic construct
  source 1..20: mol_type = other RNA
aagttttctaaaacattctt

SEQ ID NO: 8381 - RNA, 20 nt, synthetic construct
  source 1..20: mol_type = other RNA
aatacaggcctctcactctg

SEQ ID NO: 8382 - RNA, 20 nt, synthetic construct
  source 1..20: mol_type = other RNA
aatactaacattgaggttcc

SEQ ID NO: 8383 - RNA, 20 nt, synthetic construct
  source 1..20: mol_type = other RNA
aatagtgtctagtttggaag

SEQ ID NO: 8384 - RNA, 21 nt, synthetic construct
  source 1..21: mol_type = other RNA
aatagtgtctagtttggaagt

SEQ ID NO: 8385 - RNA, 20 nt, synthetic construct
  source 1..20: mol_type = other RNA
aatatggtgacccacaaaat

SEQ ID NO: 8386 - RNA, 20 nt, synthetic construct
  source 1..20: mol_type = other RNA
aatatttggtaacctttgga

SEQ ID NO: 8387 - RNA, 20 nt, synthetic construct
  source 1..20: mol_type = other RNA
aatcaataggcctgttaata

SEQ ID NO: 8388 - RNA, 20 nt, synthetic construct
  source 1..20: mol_type = other RNA
aatcccagaggattgctggt

SEQ ID NO: 8389 - RNA, 20 nt, synthetic construct
  source 1..20: mol_type = other RNA
aatccgcctcctgcctccac

SEQ ID NO: 8390 - RNA, 20 nt, synthetic construct
  source 1..20: mol_type = other RNA
aatcctctgggattctttcc

SEQ ID NO: 8391 - RNA, 21 nt, synthetic construct
  source 1..21: mol_type = other RNA
aatcctgcggacgacccttct

SEQ ID NO: 8392 - RNA, 21 nt, synthetic construct
  source 1..21: mol_type = other RNA
aatcgccgcgtcgcagaagat

SEQ ID NO: 8393 - RNA, 20 nt, synthetic construct
  source 1..20: mol_type = other RNA
aatctcgggaacctcaatgt

SEQ ID NO: 8394 - RNA, 21 nt, synthetic construct
  source 1..21: mol_type = other RNA
aatcttcttttctcattaact

SEQ ID NO: 8395 - RNA, 20 nt, synthetic construct
  source 1..20: mol_type = other RNA
aatgactctagctacctggg

SEQ ID NO: 8396 - RNA, 20 nt, synthetic construct
  source 1..20: mol_type = other RNA
aatgattaactagatgttct

SEQ ID NO: 8397 - RNA, 21 nt, synthetic construct
  source 1..21: mol_type = other RNA
aatgattaactagatgttctg

SEQ ID NO: 8398 - RNA, 20 nt, synthetic construct
  source 1..20: mol_type = other RNA
aatggcactagtaaactgag

SEQ ID NO: 8399 - RNA, 20 nt, synthetic construct
  source 1..20: mol_type = other RNA
aatggggcagcaaaacccaa

SEQ ID NO: 8400 - RNA, 20 nt, synthetic construct
  source 1..20: mol_type = other RNA
aatgtatacccaaagacaaa

SEQ ID NO: 8401 - RNA, 21 nt, synthetic construct
  source 1..21: mol_type = other RNA
aatgtatacccaaagacaaaa

SEQ ID NO: 8402 - RNA, 20 nt, synthetic construct
  source 1..20: mol_type = other RNA
aatgtcaacgaccgaccttg

SEQ ID NO: 8403 - RNA, 20 nt, synthetic construct
  source 1..20: mol_type = other RNA
aatgtttgctccagacctgc

SEQ ID NO: 8404 - RNA, 20 nt, synthetic construct
  source 1..20: mol_type = other RNA
aattcgcagtccccaacctc

SEQ ID NO: 8405 - RNA, 21 nt, synthetic construct
  source 1..21: mol_type = other RNA
aattcgttgacatactttcca

SEQ ID NO: 8406 - RNA, 20 nt, synthetic construct
  source 1..20: mol_type = other RNA
aattctttgctggggggaac

SEQ ID NO: 8407 - RNA, 20 nt, synthetic construct
  source 1..20: mol_type = other RNA
aattgagagaagtccaccac

SEQ ID NO: 8408 - RNA, 20 nt, synthetic construct
  source 1..20: mol_type = other RNA
aattggtaacagcggtaaaa

SEQ ID NO: 8409 - RNA, 20 nt, synthetic construct
  source 1..20: mol_type = other RNA
aatttatgcctacagcctcc

SEQ ID NO: 8410 - RNA, 20 nt, synthetic construct
  source 1..20: mol_type = other RNA
aatttggaagatccagcatc

SEQ ID NO: 8411 - RNA, 20 nt, synthetic construct
  source 1..20: mol_type = other RNA
aattttatgggttatgtcat

SEQ ID NO: 8412 - RNA, 21 nt, synthetic construct
  source 1..21: mol_type = other RNA
aattttatgggttatgtcatt

SEQ ID NO: 8413 - RNA, 20 nt, synthetic construct
  source 1..20: mol_type = other RNA
aattttccgaaagcccagga

SEQ ID NO: 8414 - RNA, 20 nt, synthetic construct
  source 1..20: mol_type = other RNA
acaaactttgccagcaaatc

SEQ ID NO: 8415 - RNA, 21 nt, synthetic construct
  source 1..21: mol_type = other RNA
acaaagagatggggttactct

SEQ ID NO: 8416 - RNA, 20 nt, synthetic construct
  source 1..20: mol_type = other RNA
acaaatggcactagtaaact

SEQ ID NO: 8417 - RNA, 21 nt, synthetic construct
  source 1..21: mol_type = other RNA
acaacagtagtttccggaagt

SEQ ID NO: 8418 - RNA, 21 nt, synthetic construct
  source 1..21: mol_type = other RNA
acaacctttcaccaaactctg

SEQ ID NO: 8419 - RNA, 20 nt, synthetic construct
  source 1..20: mol_type = other RNA
acaagaaatgtgaaaccaca

SEQ ID NO: 8420 - RNA, 20 nt, synthetic construct
  source 1..20: mol_type = other RNA
acaagaacacatcatacaaa

SEQ ID NO: 8421 - RNA, 20 nt, synthetic construct
  source 1..20: mol_type = other RNA
acaagaagatgaggcatagc

SEQ ID NO: 8422 - RNA, 21 nt, synthetic construct
  source 1..21: mol_type = other RNA
acaagaatcctcacaataccg

SEQ ID NO: 8423 - RNA, 20 nt, synthetic construct
  source 1..20: mol_type = other RNA
acaagagttgcctgaacttt

SEQ ID NO: 8424 - RNA, 20 nt, synthetic construct
  source 1..20: mol_type = other RNA
acaagatctacagcatgggg

SEQ ID NO: 8425 - RNA, 20 nt, synthetic construct
  source 1..20: mol_type = other RNA
acaagcggctaggagttccg

SEQ ID NO: 8426 - RNA, 20 nt, synthetic construct
  source 1..20: mol_type = other RNA
acaaggcctttctgtgtaaa

SEQ ID NO: 8427 - RNA, 20 nt, synthetic construct
  source 1..20: mol_type = other RNA
acaagggcattaacgcagga

SEQ ID NO: 8428 - RNA, 20 nt, synthetic construct
  source 1..20: mol_type = other RNA
acaatgctcaggagactcta

SEQ ID NO: 8429 - RNA, 20 nt, synthetic construct
  source 1..20: mol_type = other RNA
acaatgtggttatcctgcgt

SEQ ID NO: 8430 - RNA, 20 nt, synthetic construct
  source 1..20: mol_type = other RNA
acacacggtagttcccccta

SEQ ID NO: 8431 - RNA, 20 nt, synthetic construct
  source 1..20: mol_type = other RNA
acacatagcgcctcattttg

SEQ ID NO: 8432 - RNA, 20 nt, synthetic construct
  source 1..20: mol_type = other RNA
acacatcatacaaaaaatca

SEQ ID NO: 8433 - RNA, 21 nt, synthetic construct
  source 1..21: mol_type = other RNA
acacatccagcgataaccagg

SEQ ID NO: 8434 - RNA, 20 nt, synthetic construct
  source 1..20: mol_type = other RNA
acacctggccagacgccaac

SEQ ID NO: 8435 - RNA, 20 nt, synthetic construct
  source 1..20: mol_type = other RNA
acacggtagttccccctaga

SEQ ID NO: 8436 - RNA, 20 nt, synthetic construct
  source 1..20: mol_type = other RNA
acacggtccggcagatgaga

SEQ ID NO: 8437 - RNA, 20 nt, synthetic construct
  source 1..20: mol_type = other RNA
acactatttacacactctat

SEQ ID NO: 8438 - RNA, 20 nt, synthetic construct
  source 1..20: mol_type = other RNA
acactcatcctcaggccatg

SEQ ID NO: 8439 - RNA, 20 nt, synthetic construct
  source 1..20: mol_type = other RNA
acagaaaggccttgtaagtt

SEQ ID NO: 8440 - RNA, 20 nt, synthetic construct
  source 1..20: mol_type = other RNA
acagacggggagtccgcgta

SEQ ID NO: 8441 - RNA, 20 nt, synthetic construct
  source 1..20: mol_type = other RNA
acagagctgaggcggtatct

SEQ ID NO: 8442 - RNA, 21 nt, synthetic construct
  source 1..21: mol_type = other RNA
acagagctgaggcggtatcta

SEQ ID NO: 8443 - RNA, 21 nt, synthetic construct
  source 1..21: mol_type = other RNA
acagcaaatccagattgggac

SEQ ID NO: 8444 - RNA, 20 nt, synthetic construct
  source 1..20: mol_type = other RNA
acagcaacaggagggataca

SEQ ID NO: 8445 - RNA, 21 nt, synthetic construct
  source 1..21: mol_type = other RNA
acagcaacaggagggatacat

SEQ ID NO: 8446 - RNA, 20 nt, synthetic construct
  source 1..20: mol_type = other RNA
acagcggtaaaaagggactc

SEQ ID NO: 8447 - RNA, 20 nt, synthetic construct
  source 1..20: mol_type = other RNA
acagcttggaggcttgaaca

SEQ ID NO: 8448 - RNA, 20 nt, synthetic construct
  source 1..20: mol_type = other RNA
acaggaggttggtgagtgat

SEQ ID NO: 8449 - RNA, 21 nt, synthetic construct
  source 1..21: mol_type = other RNA
acaggaggttggtgagtgatt

SEQ ID NO: 8450 - RNA, 20 nt, synthetic construct
  source 1..20: mol_type = other RNA
acaggcggggtttttcttgt

SEQ ID NO: 8451 - RNA, 20 nt, synthetic construct
  source 1..20: mol_type = other RNA
acaggtacagtagaagaata

SEQ ID NO: 8452 - RNA, 20 nt, synthetic construct
  source 1..20: mol_type = other RNA
acaggtgcaatttccgtccg

SEQ ID NO: 8453 - RNA, 20 nt, synthetic construct
  source 1..20: mol_type = other RNA
acagtagtttccggaagtgt

SEQ ID NO: 8454 - RNA, 20 nt, synthetic construct
  source 1..20: mol_type = other RNA
acagtctttgaagtatgcct

SEQ ID NO: 8455 - RNA, 20 nt, synthetic construct
  source 1..20: mol_type = other RNA
acagtgggggaaagccctac

SEQ ID NO: 8456 - RNA, 20 nt, synthetic construct
  source 1..20: mol_type = other RNA
acagtttgtaggcccactta

SEQ ID NO: 8457 - RNA, 20 nt, synthetic construct
  source 1..20: mol_type = other RNA
acataacccataaaattcag

SEQ ID NO: 8458 - RNA, 21 nt, synthetic construct
  source 1..21: mol_type = other RNA
acataactgactactaggtct

SEQ ID NO: 8459 - RNA, 20 nt, synthetic construct
  source 1..20: mol_type = other RNA
acataccttgatagtccaga

SEQ ID NO: 8460 - RNA, 20 nt, synthetic construct
  source 1..20: mol_type = other RNA
acatcacatcaggattccta

SEQ ID NO: 8461 - RNA, 20 nt, synthetic construct
  source 1..20: mol_type = other RNA
acatcatacaaaaaatcaaa

SEQ ID NO: 8462 - RNA, 20 nt, synthetic construct
  source 1..20: mol_type = other RNA
acatcatccatataactgaa

SEQ ID NO: 8463 - RNA, 20 nt, synthetic construct
  source 1..20: mol_type = other RNA
acatccagcgataaccagga

SEQ ID NO: 8464 - RNA, 20 nt, synthetic construct
  source 1..20: mol_type = other RNA
acatcgtatccatggctgct

SEQ ID NO: 8465 - RNA, 20 nt, synthetic construct
  source 1..20: mol_type = other RNA
acatgaacaagagatgatta

SEQ ID NO: 8466 - RNA, 20 nt, synthetic construct
  source 1..20: mol_type = other RNA
acatggagaacatcacatca

SEQ ID NO: 8467 - RNA, 20 nt, synthetic construct
  source 1..20: mol_type = other RNA
acattatcaaaaaatgtgaa

SEQ ID NO: 8468 - RNA, 20 nt, synthetic construct
  source 1..20: mol_type = other RNA
acattctttgattttttgta

SEQ ID NO: 8469 - RNA, 20 nt, synthetic construct
  source 1..20: mol_type = other RNA
acattgaggttcccgagatt

SEQ ID NO: 8470 - RNA, 20 nt, synthetic construct
  source 1..20: mol_type = other RNA
acattgtgtaaatggggcag

SEQ ID NO: 8471 - RNA, 20 nt, synthetic construct
  source 1..20: mol_type = other RNA
acatttaaaccctaacaaaa

SEQ ID NO: 8472 - RNA, 20 nt, synthetic construct
  source 1..20: mol_type = other RNA
acatttcttgtctcactttt

SEQ ID NO: 8473 - RNA, 20 nt, synthetic construct
  source 1..20: mol_type = other RNA
accaaactctgcaagatccc

SEQ ID NO: 8474 - RNA, 20 nt, synthetic construct
  source 1..20: mol_type = other RNA
accaaatatttaccattgga

SEQ ID NO: 8475 - RNA, 21 nt, synthetic construct
  source 1..21: mol_type = other RNA
accaaatatttaccattggat

SEQ ID NO: 8476 - RNA, 20 nt, synthetic construct
  source 1..20: mol_type = other RNA
accaaatgcccctatcctat

SEQ ID NO: 8477 - RNA, 20 nt, synthetic construct
  source 1..20: mol_type = other RNA
accaacaagaagatgaggca

SEQ ID NO: 8478 - RNA, 21 nt, synthetic construct
  source 1..21: mol_type = other RNA
accaatttatgcctacagcct

SEQ ID NO: 8479 - RNA, 20 nt, synthetic construct
  source 1..20: mol_type = other RNA
accaattttcttttgtcttt

SEQ ID NO: 8480 - RNA, 20 nt, synthetic construct
  source 1..20: mol_type = other RNA
accacatcatccatataact

SEQ ID NO: 8481 - RNA, 20 nt, synthetic construct
  source 1..20: mol_type = other RNA
accacattgtgtaaatgggg

SEQ ID NO: 8482 - RNA, 20 nt, synthetic construct
  source 1..20: mol_type = other RNA
accaggacaagttggaggac

SEQ ID NO: 8483 - RNA, 21 nt, synthetic construct
  source 1..21: mol_type = other RNA
accaggacaagttggaggaca

SEQ ID NO: 8484 - RNA, 21 nt, synthetic construct
  source 1..21: mol_type = other RNA
accagtaaagttccccacctt

SEQ ID NO: 8485 - RNA, 20 nt, synthetic construct
  source 1..20: mol_type = other RNA
accagttggatccagccttc

SEQ ID NO: 8486 - RNA, 20 nt, synthetic construct
  source 1..20: mol_type = other RNA
acccaaagacaaaagaaaat

SEQ ID NO: 8487 - RNA, 20 nt, synthetic construct
  source 1..20: mol_type = other RNA
acccaggtagctagagtcat

SEQ ID NO: 8488 - RNA, 20 nt, synthetic construct
  source 1..20: mol_type = other RNA
acccataacttccaatgaca

SEQ ID NO: 8489 - RNA, 20 nt, synthetic construct
  source 1..20: mol_type = other RNA
accccatctctttgttttgt

SEQ ID NO: 8490 - RNA, 20 nt, synthetic construct
  source 1..20: mol_type = other RNA
accccgagaagggtcgtccg

SEQ ID NO: 8491 - RNA, 20 nt, synthetic construct
  source 1..20: mol_type = other RNA
accccgcctgtaacacgaga

SEQ ID NO: 8492 - RNA, 20 nt, synthetic construct
  source 1..20: mol_type = other RNA
accccgctgtctccaccttt

SEQ ID NO: 8493 - RNA, 20 nt, synthetic construct
  source 1..20: mol_type = other RNA
accccttctcgtgttacagg

SEQ ID NO: 8494 - RNA, 20 nt, synthetic construct
  source 1..20: mol_type = other RNA
accctaacaaaacaaagaga

SEQ ID NO: 8495 - RNA, 21 nt, synthetic construct
  source 1..21: mol_type = other RNA
acccttatccaatggtaaata

SEQ ID NO: 8496 - RNA, 20 nt, synthetic construct
  source 1..20: mol_type = other RNA
acccttctcggggtcgcttg

SEQ ID NO: 8497 - RNA, 20 nt, synthetic construct
  source 1..20: mol_type = other RNA
accgaccttgaggcatactt

SEQ ID NO: 8498 - RNA, 20 nt, synthetic construct
  source 1..20: mol_type = other RNA
accgcctcagctctgtatcg

SEQ ID NO: 8499 - RNA, 20 nt, synthetic construct
  source 1..20: mol_type = other RNA
acctagcaggcataatcaat

SEQ ID NO: 8500 - RNA, 20 nt, synthetic construct
  source 1..20: mol_type = other RNA
acctcaatgttagtattcct

SEQ ID NO: 8501 - RNA, 20 nt, synthetic construct
  source 1..20: mol_type = other RNA
acctcaccatactgcactca

SEQ ID NO: 8502 - RNA, 21 nt, synthetic construct
  source 1..21: mol_type = other RNA
acctcctgtcctccaacttgt

SEQ ID NO: 8503 - RNA, 20 nt, synthetic construct
  source 1..20: mol_type = other RNA
acctgcatgactactgctca

SEQ ID NO: 8504 - RNA, 20 nt, synthetic construct
  source 1..20: mol_type = other RNA
acctggccgttgccgggcaa

SEQ ID NO: 8505 - RNA, 20 nt, synthetic construct
  source 1..20: mol_type = other RNA
acctgggtgggtgttaattt

SEQ ID NO: 8506 - RNA, 21 nt, synthetic construct
  source 1..21: mol_type = other RNA
acctgggtgggtgttaatttg

SEQ ID NO: 8507 - RNA, 20 nt, synthetic construct
  source 1..20: mol_type = other RNA
acctgtctttaatcctcatt

SEQ ID NO: 8508 - RNA, 20 nt, synthetic construct
  source 1..20: mol_type = other RNA
accttattatccagaacatc

SEQ ID NO: 8509 - RNA, 20 nt, synthetic construct
  source 1..20: mol_type = other RNA
accttcgtctgcgaggcgag

SEQ ID NO: 8510 - RNA, 20 nt, synthetic construct
  source 1..20: mol_type = other RNA
accttgggcaacattcggtg

SEQ ID NO: 8511 - RNA, 20 nt, synthetic construct
  source 1..20: mol_type = other RNA
acctttaccccgttgcccgg

SEQ ID NO: 8512 - RNA, 20 nt, synthetic construct
  source 1..20: mol_type = other RNA
acctttcaccaaactctgca

SEQ ID NO: 8513 - RNA, 20 nt, synthetic construct
  source 1..20: mol_type = other RNA
acctttggataaaacctagc

SEQ ID NO: 8514 - RNA, 21 nt, synthetic construct
  source 1..21: mol_type = other RNA
acgaaccactgaacaaatggc

SEQ ID NO: 8515 - RNA, 20 nt, synthetic construct
  source 1..20: mol_type = other RNA
acgacgaggcaggtccccta

SEQ ID NO: 8516 - RNA, 21 nt, synthetic construct
  source 1..21: mol_type = other RNA
acgagaaggggtcctaggaat

SEQ ID NO: 8517 - RNA, 20 nt, synthetic construct
  source 1..20: mol_type = other RNA
acgaggcaggtcccctagaa

SEQ ID NO: 8518 - RNA, 20 nt, synthetic construct
  source 1..20: mol_type = other RNA
acgatgtatatttgcgggag

SEQ ID NO: 8519 - RNA, 20 nt, synthetic construct
  source 1..20: mol_type = other RNA
acgcaacccccactggctgg

SEQ ID NO: 8520 - RNA, 20 nt, synthetic construct
  source 1..20: mol_type = other RNA
acgcacgcgctgatggccca

SEQ ID NO: 8521 - RNA, 20 nt, synthetic construct
  source 1..20: mol_type = other RNA
acgccaacaaggtaggagct

SEQ ID NO: 8522 - RNA, 20 nt, synthetic construct
  source 1..20: mol_type = other RNA
acgcccaccgaatgttgccc

SEQ ID NO: 8523 - RNA, 20 nt, synthetic construct
  source 1..20: mol_type = other RNA
acgcgctgatggcccatgac

SEQ ID NO: 8524 - RNA, 20 nt, synthetic construct
  source 1..20: mol_type = other RNA
acggaggccttttggggtgg

SEQ ID NO: 8525 - RNA, 20 nt, synthetic construct
  source 1..20: mol_type = other RNA
acggcagacggagaagggga

SEQ ID NO: 8526 - RNA, 20 nt, synthetic construct
  source 1..20: mol_type = other RNA
acgggctgaggcccactccc

SEQ ID NO: 8527 - RNA, 20 nt, synthetic construct
  source 1..20: mol_type = other RNA
acggggagtccgcgtaaaga

SEQ ID NO: 8528 - RNA, 20 nt, synthetic construct
  source 1..20: mol_type = other RNA
acggggcgcacctctcttta

SEQ ID NO: 8529 - RNA, 20 nt, synthetic construct
  source 1..20: mol_type = other RNA
acggtggtctccatgcgacg

SEQ ID NO: 8530 - RNA, 20 nt, synthetic construct
  source 1..20: mol_type = other RNA
acggtttctcttccaaaagt

SEQ ID NO: 8531 - RNA, 20 nt, synthetic construct
  source 1..20: mol_type = other RNA
acgtcgcatggagaccaccg

SEQ ID NO: 8532 - RNA, 20 nt, synthetic construct
  source 1..20: mol_type = other RNA
actaatatgggcctaaagtt

SEQ ID NO: 8533 - RNA, 20 nt, synthetic construct
  source 1..20: mol_type = other RNA
actaatgactctagctacct

SEQ ID NO: 8534 - RNA, 20 nt, synthetic construct
  source 1..20: mol_type = other RNA
actaccgtgtgtcttggcca

SEQ ID NO: 8535 - RNA, 20 nt, synthetic construct
  source 1..20: mol_type = other RNA
actactaggtctctagatgc

SEQ ID NO: 8536 - RNA, 20 nt, synthetic construct
  source 1..20: mol_type = other RNA
actactgttgttagacgacg

SEQ ID NO: 8537 - RNA, 20 nt, synthetic construct
  source 1..20: mol_type = other RNA
actagatgttctggataata

SEQ ID NO: 8538 - RNA, 21 nt, synthetic construct
  source 1..21: mol_type = other RNA
actaggaggctgtaggcataa

SEQ ID NO: 8539 - RNA, 20 nt, synthetic construct
  source 1..20: mol_type = other RNA
actagtaaactgagccagga

SEQ ID NO: 8540 - RNA, 20 nt, synthetic construct
  source 1..20: mol_type = other RNA
actatttacacactctatgg

SEQ ID NO: 8541 - RNA, 21 nt, synthetic construct
  source 1..21: mol_type = other RNA
actcataaggtggggaacttt

SEQ ID NO: 8542 - RNA, 20 nt, synthetic construct
  source 1..20: mol_type = other RNA
actcccataggaattttccg

SEQ ID NO: 8543 - RNA, 20 nt, synthetic construct
  source 1..20: mol_type = other RNA
actccctcgcctcgcagacg

SEQ ID NO: 8544 - RNA, 21 nt, synthetic construct
  source 1..21: mol_type = other RNA
actcctccagcttatagacca

SEQ ID NO: 8545 - RNA, 20 nt, synthetic construct
  source 1..20: mol_type = other RNA
actcctcccagtctttaaac

SEQ ID NO: 8546 - RNA, 21 nt, synthetic construct
  source 1..21: mol_type = other RNA
actcctcccagtctttaaaca

SEQ ID NO: 8547 - RNA, 20 nt, synthetic construct
  source 1..20: mol_type = other RNA
actctaaggcttcccgatac

SEQ ID NO: 8548 - RNA, 21 nt, synthetic construct
  source 1..21: mol_type = other RNA
actctagctacctgggtgggt

SEQ ID NO: 8549 - RNA, 20 nt, synthetic construct
  source 1..20: mol_type = other RNA
actctgcaagatcccagagt

SEQ ID NO: 8550 - RNA, 20 nt, synthetic construct
  source 1..20: mol_type = other RNA
actctgttgtcctctcccgc

SEQ ID NO: 8551 - RNA, 20 nt, synthetic construct
  source 1..20: mol_type = other RNA
actgaaagccaaacagtggg

SEQ ID NO: 8552 - RNA, 20 nt, synthetic construct
  source 1..20: mol_type = other RNA
actgaacaaatggcactagt

SEQ ID NO: 8553 - RNA, 20 nt, synthetic construct
  source 1..20: mol_type = other RNA
actgaaggaaagaagtcaga

SEQ ID NO: 8554 - RNA, 20 nt, synthetic construct
  source 1..20: mol_type = other RNA
actggctggggcttggtcat

SEQ ID NO: 8555 - RNA, 20 nt, synthetic construct
  source 1..20: mol_type = other RNA
actgggaggagttgggggag

SEQ ID NO: 8556 - RNA, 20 nt, synthetic construct
  source 1..20: mol_type = other RNA
actgttgttagacgacgagg

SEQ ID NO: 8557 - RNA, 20 nt, synthetic construct
  source 1..20: mol_type = other RNA
actgtttgtttaaagactgg

SEQ ID NO: 8558 - RNA, 21 nt, synthetic construct
  source 1..21: mol_type = other RNA
actgtttgtttaaagactggg

SEQ ID NO: 8559 - RNA, 20 nt, synthetic construct
  source 1..20: mol_type = other RNA
acttacaaggcctttctgtg

SEQ ID NO: 8560 - RNA, 20 nt, synthetic construct
  source 1..20: mol_type = other RNA
acttacagttaatgagaaaa

SEQ ID NO: 8561 - RNA, 20 nt, synthetic construct
  source 1..20: mol_type = other RNA
acttcaaagactgtttgttt

SEQ ID NO: 8562 - RNA, 20 nt, synthetic construct
  source 1..20: mol_type = other RNA
acttccaatgacataaccca

SEQ ID NO: 8563 - RNA, 20 nt, synthetic construct
  source 1..20: mol_type = other RNA
acttctctcaattttctagg

SEQ ID NO: 8564 - RNA, 20 nt, synthetic construct
  source 1..20: mol_type = other RNA
actttctcgccaacttacaa

SEQ ID NO: 8565 - RNA, 20 nt, synthetic construct
  source 1..20: mol_type = other RNA
agaaaattggtaacagcggt

SEQ ID NO: 8566 - RNA, 20 nt, synthetic construct
  source 1..20: mol_type = other RNA
agaaaccgttatagagtatt

SEQ ID NO: 8567 - RNA, 20 nt, synthetic construct
  source 1..20: mol_type = other RNA
agaaaggccttgtaagttgg

SEQ ID NO: 8568 - RNA, 20 nt, synthetic construct
  source 1..20: mol_type = other RNA
agaacatcacatcaggattc

SEQ ID NO: 8569 - RNA, 20 nt, synthetic construct
  source 1..20: mol_type = other RNA
agaagaaccaacaagaagat

SEQ ID NO: 8570 - RNA, 20 nt, synthetic construct
  source 1..20: mol_type = other RNA
agaagaactccctcgcctcg

SEQ ID NO: 8571 - RNA, 20 nt, synthetic construct
  source 1..20: mol_type = other RNA
agaagatctcgtactgaagg

SEQ ID NO: 8572 - RNA, 20 nt, synthetic construct
  source 1..20: mol_type = other RNA
agaagatgaggcatagcagc

SEQ ID NO: 8573 - RNA, 20 nt, synthetic construct
  source 1..20: mol_type = other RNA
agaagattgacgataaggga

SEQ ID NO: 8574 - RNA, 20 nt, synthetic construct
  source 1..20: mol_type = other RNA
agaaggggacgagagagtcc

SEQ ID NO: 8575 - RNA, 20 nt, synthetic construct
  source 1..20: mol_type = other RNA
agaaggggtcctaggaatcc

SEQ ID NO: 8576 - RNA, 20 nt, synthetic construct
  source 1..20: mol_type = other RNA
agaagtcagaaggcaaaaac

SEQ ID NO: 8577 - RNA, 20 nt, synthetic construct
  source 1..20: mol_type = other RNA
agaatcctcacaataccgca

SEQ ID NO: 8578 - RNA, 20 nt, synthetic construct
  source 1..20: mol_type = other RNA
agacaaaagaaaattggtaa

SEQ ID NO: 8579 - RNA, 21 nt, synthetic construct
  source 1..21: mol_type = other RNA
agacaaaagaaaattggtaac

SEQ ID NO: 8580 - RNA, 20 nt, synthetic construct
  source 1..20: mol_type = other RNA
agacaagaaatgtgaaacca

SEQ ID NO: 8581 - RNA, 21 nt, synthetic construct
  source 1..21: mol_type = other RNA
agacaagaaatgtgaaaccac

SEQ ID NO: 8582 - RNA, 20 nt, synthetic construct
  source 1..20: mol_type = other RNA
agacacacggtagttccccc

SEQ ID NO: 8583 - RNA, 20 nt, synthetic construct
  source 1..20: mol_type = other RNA
agacacatccagcgataacc

SEQ ID NO: 8584 - RNA, 20 nt, synthetic construct
  source 1..20: mol_type = other RNA
agacaccaaatactctataa

SEQ ID NO: 8585 - RNA, 20 nt, synthetic construct
  source 1..20: mol_type = other RNA
agacaggtacagtagaagaa

SEQ ID NO: 8586 - RNA, 20 nt, synthetic construct
  source 1..20: mol_type = other RNA
agaccaccgtgaacgcccac

SEQ ID NO: 8587 - RNA, 20 nt, synthetic construct
  source 1..20: mol_type = other RNA
agacctgctgcgagcaaaac

SEQ ID NO: 8588 - RNA, 20 nt, synthetic construct
  source 1..20: mol_type = other RNA
agaccttcgtctgcgaggcg

SEQ ID NO: 8589 - RNA, 21 nt, synthetic construct
  source 1..21: mol_type = other RNA
agaccttcgtctgcgaggcga

SEQ ID NO: 8590 - RNA, 20 nt, synthetic construct
  source 1..20: mol_type = other RNA
agaccttgggcaacattcgg

SEQ ID NO: 8591 - RNA, 20 nt, synthetic construct
  source 1..20: mol_type = other RNA
agacgacgaggcaggtcccc

SEQ ID NO: 8592 - RNA, 20 nt, synthetic construct
  source 1..20: mol_type = other RNA
agacggagaaggggacgaga

SEQ ID NO: 8593 - RNA, 20 nt, synthetic construct
  source 1..20: mol_type = other RNA
agacggggagtccgcgtaaa

SEQ ID NO: 8594 - RNA, 21 nt, synthetic construct
  source 1..21: mol_type = other RNA
agacggggagtccgcgtaaag

SEQ ID NO: 8595 - RNA, 20 nt, synthetic construct
  source 1..20: mol_type = other RNA
agactgggaggagttggggg

SEQ ID NO: 8596 - RNA, 21 nt, synthetic construct
  source 1..21: mol_type = other RNA
agactgggaggagttggggga

SEQ ID NO: 8597 - RNA, 20 nt, synthetic construct
  source 1..20: mol_type = other RNA
agactgtttgtttaaagact

SEQ ID NO: 8598 - RNA, 20 nt, synthetic construct
  source 1..20: mol_type = other RNA
agagaagtccaccacgagtc

SEQ ID NO: 8599 - RNA, 20 nt, synthetic construct
  source 1..20: mol_type = other RNA
agagaggtgcgccccgtggt

SEQ ID NO: 8600 - RNA, 20 nt, synthetic construct
  source 1..20: mol_type = other RNA
agagagtcccaagcgacccc

SEQ ID NO: 8601 - RNA, 20 nt, synthetic construct
  source 1..20: mol_type = other RNA
agagatgattaggcagaggt

SEQ ID NO: 8602 - RNA, 20 nt, synthetic construct
  source 1..20: mol_type = other RNA
agagcaaacacagcaaatcc

SEQ ID NO: 8603 - RNA, 20 nt, synthetic construct
  source 1..20: mol_type = other RNA
agagctgaggcggtatctag

SEQ ID NO: 8604 - RNA, 20 nt, synthetic construct
  source 1..20: mol_type = other RNA
agaggaagatgataaaacgc

SEQ ID NO: 8605 - RNA, 20 nt, synthetic construct
  source 1..20: mol_type = other RNA
agaggcctgtatttccctgc

SEQ ID NO: 8606 - RNA, 20 nt, synthetic construct
  source 1..20: mol_type = other RNA
agagtatttggtgtctttcg

SEQ ID NO: 8607 - RNA, 20 nt, synthetic construct
  source 1..20: mol_type = other RNA
agagtcccaagcgaccccga

SEQ ID NO: 8608 - RNA, 21 nt, synthetic construct
  source 1..21: mol_type = other RNA
agagtcccaagcgaccccgag

SEQ ID NO: 8609 - RNA, 20 nt, synthetic construct
  source 1..20: mol_type = other RNA
agagtttggtgaaaggttgt

SEQ ID NO: 8610 - RNA, 20 nt, synthetic construct
  source 1..20: mol_type = other RNA
agatccagcatctagagacc

SEQ ID NO: 8611 - RNA, 21 nt, synthetic construct
  source 1..21: mol_type = other RNA
agatccagcatctagagacct

SEQ ID NO: 8612 - RNA, 20 nt, synthetic construct
  source 1..20: mol_type = other RNA
agatctcgtactgaaggaaa

SEQ ID NO: 8613 - RNA, 20 nt, synthetic construct
  source 1..20: mol_type = other RNA
agatcttctagataccgcct

SEQ ID NO: 8614 - RNA, 20 nt, synthetic construct
  source 1..20: mol_type = other RNA
agatcttgttcccaagaata

SEQ ID NO: 8615 - RNA, 20 nt, synthetic construct
  source 1..20: mol_type = other RNA
agatgagaaggcacagacgg

SEQ ID NO: 8616 - RNA, 20 nt, synthetic construct
  source 1..20: mol_type = other RNA
agatgattaggcagaggtga

SEQ ID NO: 8617 - RNA, 20 nt, synthetic construct
  source 1..20: mol_type = other RNA
agatgctggatcttccaaat

SEQ ID NO: 8618 - RNA, 21 nt, synthetic construct
  source 1..21: mol_type = other RNA
agatgctgtacagacttggcc

SEQ ID NO: 8619 - RNA, 20 nt, synthetic construct
  source 1..20: mol_type = other RNA
agattaaaggtctttgtact

SEQ ID NO: 8620 - RNA, 20 nt, synthetic construct
  source 1..20: mol_type = other RNA
agattgaatacatgcataca

SEQ ID NO: 8621 - RNA, 20 nt, synthetic construct
  source 1..20: mol_type = other RNA
agattgcaattgattatgcc

SEQ ID NO: 8622 - RNA, 20 nt, synthetic construct
  source 1..20: mol_type = other RNA
agcaaaacccaaaagaccca

SEQ ID NO: 8623 - RNA, 20 nt, synthetic construct
  source 1..20: mol_type = other RNA
agcaaatccgcctcctgcct

SEQ ID NO: 8624 - RNA, 20 nt, synthetic construct
  source 1..20: mol_type = other RNA
agcaacaggagggatacata

SEQ ID NO: 8625 - RNA, 21 nt, synthetic construct
  source 1..21: mol_type = other RNA
agcaattctttgctgggggga

SEQ ID NO: 8626 - RNA, 20 nt, synthetic construct
  source 1..20: mol_type = other RNA
agcagtagtcatgcaggttc

SEQ ID NO: 8627 - RNA, 20 nt, synthetic construct
  source 1..20: mol_type = other RNA
agccaccagcagggaaatac

SEQ ID NO: 8628 - RNA, 20 nt, synthetic construct
  source 1..20: mol_type = other RNA
agccacccaaggcacagctt

SEQ ID NO: 8629 - RNA, 20 nt, synthetic construct
  source 1..20: mol_type = other RNA
agccaggagaaacgggctga

SEQ ID NO: 8630 - RNA, 20 nt, synthetic construct
  source 1..20: mol_type = other RNA
agcccaggatgatgggatgg

SEQ ID NO: 8631 - RNA, 20 nt, synthetic construct
  source 1..20: mol_type = other RNA
agccctacgaaccactgaac

SEQ ID NO: 8632 - RNA, 20 nt, synthetic construct
  source 1..20: mol_type = other RNA
agccgaaaaggttccacgca

SEQ ID NO: 8633 - RNA, 20 nt, synthetic construct
  source 1..20: mol_type = other RNA
agcctgagggctccacccca

SEQ ID NO: 8634 - RNA, 20 nt, synthetic construct
  source 1..20: mol_type = other RNA
agccttcagagcaaacacag

SEQ ID NO: 8635 - RNA, 20 nt, synthetic construct
  source 1..20: mol_type = other RNA
agcgataaccaggacaagtt

SEQ ID NO: 8636 - RNA, 20 nt, synthetic construct
  source 1..20: mol_type = other RNA
agcgcagggtccccaatcct

SEQ ID NO: 8637 - RNA, 20 nt, synthetic construct
  source 1..20: mol_type = other RNA
agcgccgacgggacgtaaac

SEQ ID NO: 8638 - RNA, 21 nt, synthetic construct
  source 1..21: mol_type = other RNA
agcggctaggagttccgcagt

SEQ ID NO: 8639 - RNA, 21 nt, synthetic construct
  source 1..21: mol_type = other RNA
agctccaaattctttataagg

SEQ ID NO: 8640 - RNA, 20 nt, synthetic construct
  source 1..20: mol_type = other RNA
agctctgtatcgggaagcct

SEQ ID NO: 8641 - RNA, 20 nt, synthetic construct
  source 1..20: mol_type = other RNA
agctgtgccttgggtggctt

SEQ ID NO: 8642 - RNA, 20 nt, synthetic construct
  source 1..20: mol_type = other RNA
agcttggaggcttgaacagt

SEQ ID NO: 8643 - RNA, 20 nt, synthetic construct
  source 1..20: mol_type = other RNA
aggaaagaagtcagaaggca

SEQ ID NO: 8644 - RNA, 20 nt, synthetic construct
  source 1..20: mol_type = other RNA
aggaagatgataaaacgccg

SEQ ID NO: 8645 - RNA, 21 nt, synthetic construct
  source 1..21: mol_type = other RNA
aggaagttttctaaaacattc

SEQ ID NO: 8646 - RNA, 20 nt, synthetic construct
  source 1..20: mol_type = other RNA
aggaattttccgaaagccca

SEQ ID NO: 8647 - RNA, 21 nt, synthetic construct
  source 1..21: mol_type = other RNA
aggaattttccgaaagcccag

SEQ ID NO: 8648 - RNA, 20 nt, synthetic construct
  source 1..20: mol_type = other RNA
aggacaagttggaggacagg

SEQ ID NO: 8649 - RNA, 20 nt, synthetic construct
  source 1..20: mol_type = other RNA
aggaccccttctcgtgttac

SEQ ID NO: 8650 - RNA, 20 nt, synthetic construct
  source 1..20: mol_type = other RNA
aggacgtcccgcgcaggatc

SEQ ID NO: 8651 - RNA, 20 nt, synthetic construct
  source 1..20: mol_type = other RNA
aggagcagtaaaccctgttc

SEQ ID NO: 8652 - RNA, 20 nt, synthetic construct
  source 1..20: mol_type = other RNA
aggagctggagcattcgggc

SEQ ID NO: 8653 - RNA, 20 nt, synthetic construct
  source 1..20: mol_type = other RNA
aggaggcggatttgctggca

SEQ ID NO: 8654 - RNA, 20 nt, synthetic construct
  source 1..20: mol_type = other RNA
aggaggctgtaggcataaat

SEQ ID NO: 8655 - RNA, 20 nt, synthetic construct
  source 1..20: mol_type = other RNA
aggaggttggtgagtgattg

SEQ ID NO: 8656 - RNA, 20 nt, synthetic construct
  source 1..20: mol_type = other RNA
aggagtgcgaatccacactc

SEQ ID NO: 8657 - RNA, 21 nt, synthetic construct
  source 1..21: mol_type = other RNA
gaactccctcgcctcgcagac

SEQ ID NO: 8658 - RNA, 20 nt, synthetic construct
  source 1..20: mol_type = other RNA
aggagttgggggaggagatt

SEQ ID NO: 8659 - RNA, 20 nt, synthetic construct
  source 1..20: mol_type = other RNA
aggatcctcaaccaccagca

SEQ ID NO: 8660 - RNA, 20 nt, synthetic construct
  source 1..20: mol_type = other RNA
aggatcctggaattagagga

SEQ ID NO: 8661 - RNA, 20 nt, synthetic construct
  source 1..20: mol_type = other RNA
aggatgaagaggaagatgat

SEQ ID NO: 8662 - RNA, 20 nt, synthetic construct
  source 1..20: mol_type = other RNA
aggatgatgggatgggaata

SEQ ID NO: 8663 - RNA, 20 nt, synthetic construct
  source 1..20: mol_type = other RNA
aggattaaagacaggtacag

SEQ ID NO: 8664 - RNA, 20 nt, synthetic construct
  source 1..20: mol_type = other RNA
aggattcttgtcaacaagaa

SEQ ID NO: 8665 - RNA, 20 nt, synthetic construct
  source 1..20: mol_type = other RNA
aggattggggaccctgcgct

SEQ ID NO: 8666 - RNA, 21 nt, synthetic construct
  source 1..21: mol_type = other RNA
aggcaaaaacgagagtaactc

SEQ ID NO: 8667 - RNA, 20 nt, synthetic construct
  source 1..20: mol_type = other RNA
aggcaagcaattctttgctg

SEQ ID NO: 8668 - RNA, 20 nt, synthetic construct
  source 1..20: mol_type = other RNA
aggcaggaggcggatttgct

SEQ ID NO: 8669 - RNA, 20 nt, synthetic construct
  source 1..20: mol_type = other RNA
aggcaggtcccctagaagaa

SEQ ID NO: 8670 - RNA, 20 nt, synthetic construct
  source 1..20: mol_type = other RNA
aggcatagcagcaggatgaa

SEQ ID NO: 8671 - RNA, 20 nt, synthetic construct
  source 1..20: mol_type = other RNA
aggcccacttacagttaatg

SEQ ID NO: 8672 - RNA, 20 nt, synthetic construct
  source 1..20: mol_type = other RNA
aggcctccgtgcggtggggt

SEQ ID NO: 8673 - RNA, 20 nt, synthetic construct
  source 1..20: mol_type = other RNA
aggccttgtaagttggcgag

SEQ ID NO: 8674 - RNA, 20 nt, synthetic construct
  source 1..20: mol_type = other RNA
aggcgagggagttcttcttc

SEQ ID NO: 8675 - RNA, 20 nt, synthetic construct
  source 1..20: mol_type = other RNA
aggcgggtatattatataag

SEQ ID NO: 8676 - RNA, 21 nt, synthetic construct
  source 1..21: mol_type = other RNA
aggctgccttcctgtctggcg

SEQ ID NO: 8677 - RNA, 20 nt, synthetic construct
  source 1..20: mol_type = other RNA
aggcttcccgatacagagct

SEQ ID NO: 8678 - RNA, 20 nt, synthetic construct
  source 1..20: mol_type = other RNA
aggcttgaacagtaggacat

SEQ ID NO: 8679 - RNA, 20 nt, synthetic construct
  source 1..20: mol_type = other RNA
agggactcaagatgctgtac

SEQ ID NO: 8680 - RNA, 21 nt, synthetic construct
  source 1..21: mol_type = other RNA
agggagaggcagtagtcggaa

SEQ ID NO: 8681 - RNA, 20 nt, synthetic construct
  source 1..20: mol_type = other RNA
agggatacatagaggttcct

SEQ ID NO: 8682 - RNA, 20 nt, synthetic construct
  source 1..20: mol_type = other RNA
agggctttcccccactgttt

SEQ ID NO: 8683 - RNA, 20 nt, synthetic construct
  source 1..20: mol_type = other RNA
aggggacctgcctcgtcgtc

SEQ ID NO: 8684 - RNA, 20 nt, synthetic construct
  source 1..20: mol_type = other RNA
aggggcatttggtggtctat

SEQ ID NO: 8685 - RNA, 20 nt, synthetic construct
  source 1..20: mol_type = other RNA
agggtccccaatcctcgaga

SEQ ID NO: 8686 - RNA, 20 nt, synthetic construct
  source 1..20: mol_type = other RNA
agggtcgatgtccatgcccc

SEQ ID NO: 8687 - RNA, 20 nt, synthetic construct
  source 1..20: mol_type = other RNA
agggtttaaatgtataccca

SEQ ID NO: 8688 - RNA, 20 nt, synthetic construct
  source 1..20: mol_type = other RNA
agggtttactgctcctgaac

SEQ ID NO: 8689 - RNA, 21 nt, synthetic construct
  source 1..21: mol_type = other RNA
aggtacagtagaagaataaag

SEQ ID NO: 8690 - RNA, 20 nt, synthetic construct
  source 1..20: mol_type = other RNA
aggtaggagctggagcattc

SEQ ID NO: 8691 - RNA, 21 nt, synthetic construct
  source 1..21: mol_type = other RNA
aggtatgttgcccgtttgtcc

SEQ ID NO: 8692 - RNA, 20 nt, synthetic construct
  source 1..20: mol_type = other RNA
aggtattgtttacacagaaa

SEQ ID NO: 8693 - RNA, 20 nt, synthetic construct
  source 1..20: mol_type = other RNA
aggtcggtcgttgacattgc

SEQ ID NO: 8694 - RNA, 21 nt, synthetic construct
  source 1..21: mol_type = other RNA
aggtcggtcgttgacattgca

SEQ ID NO: 8695 - RNA, 20 nt, synthetic construct
  source 1..20: mol_type = other RNA
aggtctcaatcgccgcgtcg

SEQ ID NO: 8696 - RNA, 20 nt, synthetic construct
  source 1..20: mol_type = other RNA
aggtctggagcaaacattat

SEQ ID NO: 8697 - RNA, 20 nt, synthetic construct
  source 1..20: mol_type = other RNA
aggtgcgccccgtggtcggt

SEQ ID NO: 8698 - RNA, 20 nt, synthetic construct
  source 1..20: mol_type = other RNA
aggtgtccttgttgggattg

SEQ ID NO: 8699 - RNA, 20 nt, synthetic construct
  source 1..20: mol_type = other RNA
aggttcaggtattgtttaca

SEQ ID NO: 8700 - RNA, 20 nt, synthetic construct
  source 1..20: mol_type = other RNA
aggttccacgcacgcgctga

SEQ ID NO: 8701 - RNA, 20 nt, synthetic construct
  source 1..20: mol_type = other RNA
aggttggggactgcgaattt

SEQ ID NO: 8702 - RNA, 20 nt, synthetic construct
  source 1..20: mol_type = other RNA
aggtttggtacagcaacagg

SEQ ID NO: 8703 - RNA, 20 nt, synthetic construct
  source 1..20: mol_type = other RNA
aggttttatccaaaggttac

SEQ ID NO: 8704 - RNA, 20 nt, synthetic construct
  source 1..20: mol_type = other RNA
agtaaagttccccaccttat

SEQ ID NO: 8705 - RNA, 20 nt, synthetic construct
  source 1..20: mol_type = other RNA
agtaactccacagtagctcc

SEQ ID NO: 8706 - RNA, 21 nt, synthetic construct
  source 1..21: mol_type = other RNA
agtaatgattaactagatgtt

SEQ ID NO: 8707 - RNA, 20 nt, synthetic construct
  source 1..20: mol_type = other RNA
agtagaagaataaagaccag

SEQ ID NO: 8708 - RNA, 20 nt, synthetic construct
  source 1..20: mol_type = other RNA
agtagctccaaattctttat

SEQ ID NO: 8709 - RNA, 20 nt, synthetic construct
  source 1..20: mol_type = other RNA
agtaggacatgaacaagaga

SEQ ID NO: 8710 - RNA, 20 nt, synthetic construct
  source 1..20: mol_type = other RNA
agtagtttccggaagtgttg

SEQ ID NO: 8711 - RNA, 21 nt, synthetic construct
  source 1..21: mol_type = other RNA
agtagtttccggaagtgttga

SEQ ID NO: 8712 - RNA, 20 nt, synthetic construct
  source 1..20: mol_type = other RNA
agtcattagttccccccagc

SEQ ID NO: 8713 - RNA, 21 nt, synthetic construct
  source 1..21: mol_type = other RNA
agtcattagttccccccagca

SEQ ID NO: 8714 - RNA, 20 nt, synthetic construct
  source 1..20: mol_type = other RNA
agtccaagagtcctcttatg

SEQ ID NO: 8715 - RNA, 20 nt, synthetic construct
  source 1..20: mol_type = other RNA
agtccaaggaatactaacat

SEQ ID NO: 8716 - RNA, 20 nt, synthetic construct
  source 1..20: mol_type = other RNA
agtccagaagaaccaacaag

SEQ ID NO: 8717 - RNA, 20 nt, synthetic construct
  source 1..20: mol_type = other RNA
agtcccaagcgaccccgaga

SEQ ID NO: 8718 - RNA, 20 nt, synthetic construct
  source 1..20: mol_type = other RNA
agtccccaacctccaatcac

SEQ ID NO: 8719 - RNA, 20 nt, synthetic construct
  source 1..20: mol_type = other RNA
agtcccgataatgtttgctc

SEQ ID NO: 8720 - RNA, 20 nt, synthetic construct
  source 1..20: mol_type = other RNA
agtccgcgtaaagagaggtg

SEQ ID NO: 8721 - RNA, 20 nt, synthetic construct
  source 1..20: mol_type = other RNA
agtcctcttatgtaagacct

SEQ ID NO: 8722 - RNA, 21 nt, synthetic construct
  source 1..21: mol_type = other RNA
agtctttaaacaaacagtctt

SEQ ID NO: 8723 - RNA, 20 nt, synthetic construct
  source 1..20: mol_type = other RNA
agtctttgaagtatgcctca

SEQ ID NO: 8724 - RNA, 20 nt, synthetic construct
  source 1..20: mol_type = other RNA
agtgaaagcctgcttagatt

SEQ ID NO: 8725 - RNA, 20 nt, synthetic construct
  source 1..20: mol_type = other RNA
agtgattggaggttggggac

SEQ ID NO: 8726 - RNA, 21 nt, synthetic construct
  source 1..21: mol_type = other RNA
agtgattggaggttggggact

SEQ ID NO: 8727 - RNA, 20 nt, synthetic construct
  source 1..20: mol_type = other RNA
agtgcacacggtccggcaga

SEQ ID NO: 8728 - RNA, 20 nt, synthetic construct
  source 1..20: mol_type = other RNA
agtgcgaatccacactccga

SEQ ID NO: 8729 - RNA, 20 nt, synthetic construct
  source 1..20: mol_type = other RNA
agtgtctagtttggaagtaa

SEQ ID NO: 8730 - RNA, 20 nt, synthetic construct
  source 1..20: mol_type = other RNA
agtgtggattcgcactcctc

SEQ ID NO: 8731 - RNA, 21 nt, synthetic construct
  source 1..21: mol_type = other RNA
agtgttgataggataggggca

SEQ ID NO: 8732 - RNA, 20 nt, synthetic construct
  source 1..20: mol_type = other RNA
agttaatgagaaaagaagat

SEQ ID NO: 8733 - RNA, 20 nt, synthetic construct
  source 1..20: mol_type = other RNA
agttatgggtccttgccaca

SEQ ID NO: 8734 - RNA, 20 nt, synthetic construct
  source 1..20: mol_type = other RNA
agttatgtcaacactaatat

SEQ ID NO: 8735 - RNA, 20 nt, synthetic construct
  source 1..20: mol_type = other RNA
agttccccaccttatgagtc

SEQ ID NO: 8736 - RNA, 20 nt, synthetic construct
  source 1..20: mol_type = other RNA
agttccccccagcaaagaat

SEQ ID NO: 8737 - RNA, 20 nt, synthetic construct
  source 1..20: mol_type = other RNA
agttccccctagaaaattga

SEQ ID NO: 8738 - RNA, 21 nt, synthetic construct
  source 1..21: mol_type = other RNA
agttccccctagaaaattgag

SEQ ID NO: 8739 - RNA, 20 nt, synthetic construct
  source 1..20: mol_type = other RNA
agttccgcagtatggatcgg

SEQ ID NO: 8740 - RNA, 20 nt, synthetic construct
  source 1..20: mol_type = other RNA
agttcttcttctaggggacc

SEQ ID NO: 8741 - RNA, 20 nt, synthetic construct
  source 1..20: mol_type = other RNA
agttgcatggtgctggtgcg

SEQ ID NO: 8742 - RNA, 20 nt, synthetic construct
  source 1..20: mol_type = other RNA
agttggcagcacagcctagc

SEQ ID NO: 8743 - RNA, 20 nt, synthetic construct
  source 1..20: mol_type = other RNA
agtttccggaagtgttgata

SEQ ID NO: 8744 - RNA, 21 nt, synthetic construct
  source 1..21: mol_type = other RNA
ataaagaatttggagctactg

SEQ ID NO: 8745 - RNA, 20 nt, synthetic construct
  source 1..20: mol_type = other RNA
ataaattggtctgcgcacca

SEQ ID NO: 8746 - RNA, 20 nt, synthetic construct
  source 1..20: mol_type = other RNA
ataaccacattgtgtaaatg

SEQ ID NO: 8747 - RNA, 20 nt, synthetic construct
  source 1..20: mol_type = other RNA
ataactctgttgtcctctcc

SEQ ID NO: 8748 - RNA, 21 nt, synthetic construct
  source 1..21: mol_type = other RNA
ataactctgttgtcctctccc

SEQ ID NO: 8749 - RNA, 20 nt, synthetic construct
  source 1..20: mol_type = other RNA
ataactgaaagccaaacagt

SEQ ID NO: 8750 - RNA, 20 nt, synthetic construct
  source 1..20: mol_type = other RNA
ataactgactactaggtctc

SEQ ID NO: 8751 - RNA, 20 nt, synthetic construct
  source 1..20: mol_type = other RNA
ataagagagaaacaacacat

SEQ ID NO: 8752 - RNA, 20 nt, synthetic construct
  source 1..20: mol_type = other RNA
ataagggagaggcagtagtc

SEQ ID NO: 8753 - RNA, 20 nt, synthetic construct
  source 1..20: mol_type = other RNA
ataatatacccgccttccat

SEQ ID NO: 8754 - RNA, 20 nt, synthetic construct
  source 1..20: mol_type = other RNA
atacaggtgcaatttccgtc

SEQ ID NO: 8755 - RNA, 21 nt, synthetic construct
  source 1..21: mol_type = other RNA
atacaggtgcaatttccgtcc

SEQ ID NO: 8756 - RNA, 20 nt, synthetic construct
  source 1..20: mol_type = other RNA
atacatagaggttccttgag

SEQ ID NO: 8757 - RNA, 21 nt, synthetic construct
  source 1..21: mol_type = other RNA
atacatagaggttccttgagc

SEQ ID NO: 8758 - RNA, 20 nt, synthetic construct
  source 1..20: mol_type = other RNA
atacatgcatacaagggcat

SEQ ID NO: 8759 - RNA, 20 nt, synthetic construct
  source 1..20: mol_type = other RNA
ataccgcctcagctctgtat

SEQ ID NO: 8760 - RNA, 20 nt, synthetic construct
  source 1..20: mol_type = other RNA
atacgatgtatatttgcggg

SEQ ID NO: 8761 - RNA, 20 nt, synthetic construct
  source 1..20: mol_type = other RNA
atactaacattgaggttccc

SEQ ID NO: 8762 - RNA, 20 nt, synthetic construct
  source 1..20: mol_type = other RNA
atactacaaactttgccagc

SEQ ID NO: 8763 - RNA, 20 nt, synthetic construct
  source 1..20: mol_type = other RNA
atagagtatttggtgtcttt

SEQ ID NO: 8764 - RNA, 20 nt, synthetic construct
  source 1..20: mol_type = other RNA
atagcagcaggatgaagagg

SEQ ID NO: 8765 - RNA, 20 nt, synthetic construct
  source 1..20: mol_type = other RNA
atagcgcctcattttgtggg

SEQ ID NO: 8766 - RNA, 20 nt, synthetic construct
  source 1..20: mol_type = other RNA
ataggaattttccgaaagcc

SEQ ID NO: 8767 - RNA, 20 nt, synthetic construct
  source 1..20: mol_type = other RNA
atagtccagaagaaccaaca

SEQ ID NO: 8768 - RNA, 21 nt, synthetic construct
  source 1..21: mol_type = other RNA
atagtccagaagaaccaacaa

SEQ ID NO: 8769 - RNA, 21 nt, synthetic construct
  source 1..21: mol_type = other RNA
atataatatacccgccttcca

SEQ ID NO: 8770 - RNA, 20 nt, synthetic construct
  source 1..20: mol_type = other RNA
atatacatcgtatccatggc

SEQ ID NO: 8771 - RNA, 20 nt, synthetic construct
  source 1..20: mol_type = other RNA
atatggatgatgtggtattg

SEQ ID NO: 8772 - RNA, 20 nt, synthetic construct
  source 1..20: mol_type = other RNA
atatgggcctaaagttcagg

SEQ ID NO: 8773 - RNA, 20 nt, synthetic construct
  source 1..20: mol_type = other RNA
atatggtgacccacaaaatg

SEQ ID NO: 8774 - RNA, 20 nt, synthetic construct
  source 1..20: mol_type = other RNA
atatttgcgggagaggacaa

SEQ ID NO: 8775 - RNA, 20 nt, synthetic construct
  source 1..20: mol_type = other RNA
atatttggtaacctttggat

SEQ ID NO: 8776 - RNA, 20 nt, synthetic construct
  source 1..20: mol_type = other RNA
atcaataggcctgttaatag

SEQ ID NO: 8777 - RNA, 20 nt, synthetic construct
  source 1..20: mol_type = other RNA
atccaaaggttaccaaatat

SEQ ID NO: 8778 - RNA, 20 nt, synthetic construct
  source 1..20: mol_type = other RNA
atccaactggtggtcgggaa

SEQ ID NO: 8779 - RNA, 20 nt, synthetic construct
  source 1..20: mol_type = other RNA
atccaatggtaaatatttgg

SEQ ID NO: 8780 - RNA, 20 nt, synthetic construct
  source 1..20: mol_type = other RNA
atccacactccgaaagacac

SEQ ID NO: 8781 - RNA, 20 nt, synthetic construct
  source 1..20: mol_type = other RNA
atccagttggcagcacagcc

SEQ ID NO: 8782 - RNA, 20 nt, synthetic construct
  source 1..20: mol_type = other RNA
atccatactgcggaactcct

SEQ ID NO: 8783 - RNA, 20 nt, synthetic construct
  source 1..20: mol_type = other RNA
atcccagaggattgctggtg

SEQ ID NO: 8784 - RNA, 21 nt, synthetic construct
  source 1..21: mol_type = other RNA
atcccagaggattgctggtgg

SEQ ID NO: 8785 - RNA, 20 nt, synthetic construct
  source 1..20: mol_type = other RNA
atcccatcatcctgggcttt

SEQ ID NO: 8786 - RNA, 20 nt, synthetic construct
  source 1..20: mol_type = other RNA
atccctcctgttgctgtacc

SEQ ID NO: 8787 - RNA, 20 nt, synthetic construct
  source 1..20: mol_type = other RNA
atcctcgagaagattgacga

SEQ ID NO: 8788 - RNA, 20 nt, synthetic construct
  source 1..20: mol_type = other RNA
atcctgcggacgacccttct

SEQ ID NO: 8789 - RNA, 20 nt, synthetic construct
  source 1..20: mol_type = other RNA
atcgacccttataaagaatt

SEQ ID NO: 8790 - RNA, 20 nt, synthetic construct
  source 1..20: mol_type = other RNA
atctagaagatctcgtactg

SEQ ID NO: 8791 - RNA, 20 nt, synthetic construct
  source 1..20: mol_type = other RNA
atctagttaatcattacttc

SEQ ID NO: 8792 - RNA, 21 nt, synthetic construct
  source 1..21: mol_type = other RNA
atctctttgttttgttagggt

SEQ ID NO: 8793 - RNA, 21 nt, synthetic construct
  source 1..21: mol_type = other RNA
atcttccaaattaacacccac

SEQ ID NO: 8794 - RNA, 20 nt, synthetic construct
  source 1..20: mol_type = other RNA
atcttctgcgacgcggcgat

SEQ ID NO: 8795 - RNA, 20 nt, synthetic construct
  source 1..20: mol_type = other RNA
atcttcttgttggttcttct

SEQ ID NO: 8796 - RNA, 20 nt, synthetic construct
  source 1..20: mol_type = other RNA
atcttgcagagtttggtgaa

SEQ ID NO: 8797 - RNA, 21 nt, synthetic construct
  source 1..21: mol_type = other RNA
atctttccaccagcaatcctc

SEQ ID NO: 8798 - RNA, 20 nt, synthetic construct
  source 1..20: mol_type = other RNA
atgaacaagagatgattagg

SEQ ID NO: 8799 - RNA, 21 nt, synthetic construct
  source 1..21: mol_type = other RNA
atgaacaagagatgattaggc

SEQ ID NO: 8800 - RNA, 20 nt, synthetic construct
  source 1..20: mol_type = other RNA
atgacataacccataaaatt

SEQ ID NO: 8801 - RNA, 20 nt, synthetic construct
  source 1..20: mol_type = other RNA
atgaccaagccccagccagt

SEQ ID NO: 8802 - RNA, 20 nt, synthetic construct
  source 1..20: mol_type = other RNA
atgactctagctacctgggt

SEQ ID NO: 8803 - RNA, 20 nt, synthetic construct
  source 1..20: mol_type = other RNA
atgaggattaaagacaggta

SEQ ID NO: 8804 - RNA, 20 nt, synthetic construct
  source 1..20: mol_type = other RNA
atgaggcatagcagcaggat

SEQ ID NO: 8805 - RNA, 20 nt, synthetic construct
  source 1..20: mol_type = other RNA
atgagtgtttctcaaaggtg

SEQ ID NO: 8806 - RNA, 21 nt, synthetic construct
  source 1..21: mol_type = other RNA
atgatgggatgggaatacagg

SEQ ID NO: 8807 - RNA, 20 nt, synthetic construct
  source 1..20: mol_type = other RNA
atgatgtggtattgggggcc

SEQ ID NO: 8808 - RNA, 20 nt, synthetic construct
  source 1..20: mol_type = other RNA
atgatgtgttcttgtggcaa

SEQ ID NO: 8809 - RNA, 20 nt, synthetic construct
  source 1..20: mol_type = other RNA
atgattaggcagaggtgaaa

SEQ ID NO: 8810 - RNA, 20 nt, synthetic construct
  source 1..20: mol_type = other RNA
atgcatacaagggcattaac

SEQ ID NO: 8811 - RNA, 21 nt, synthetic construct
  source 1..21: mol_type = other RNA
atgcatacaagggcattaacg

SEQ ID NO: 8812 - RNA, 20 nt, synthetic construct
  source 1..20: mol_type = other RNA
atgcatgtattcaatctaag

SEQ ID NO: 8813 - RNA, 20 nt, synthetic construct
  source 1..20: mol_type = other RNA
atgcctacagcctcctagta

SEQ ID NO: 8814 - RNA, 20 nt, synthetic construct
  source 1..20: mol_type = other RNA
atgcctgctaggttttatcc

SEQ ID NO: 8815 - RNA, 21 nt, synthetic construct
  source 1..21: mol_type = other RNA
atgcgacgtgcagaggtgaag

SEQ ID NO: 8816 - RNA, 20 nt, synthetic construct
  source 1..20: mol_type = other RNA
atgctgtagatcttgttccc

SEQ ID NO: 8817 - RNA, 20 nt, synthetic construct
  source 1..20: mol_type = other RNA
atggacatcgacccttataa

SEQ ID NO: 8818 - RNA, 20 nt, synthetic construct
  source 1..20: mol_type = other RNA
atggatacgatgtatatttg

SEQ ID NO: 8819 - RNA, 20 nt, synthetic construct
  source 1..20: mol_type = other RNA
atggatcggcagaggagccg

SEQ ID NO: 8820 - RNA, 21 nt, synthetic construct
  source 1..21: mol_type = other RNA
atggatcggcagaggagccga

SEQ ID NO: 8821 - RNA, 20 nt, synthetic construct
  source 1..20: mol_type = other RNA
atggatgatgtggtattggg

SEQ ID NO: 8822 - RNA, 20 nt, synthetic construct
  source 1..20: mol_type = other RNA
atggcactagtaaactgagc

SEQ ID NO: 8823 - RNA, 20 nt, synthetic construct
  source 1..20: mol_type = other RNA
atggcccatgaccaagcccc

SEQ ID NO: 8824 - RNA, 21 nt, synthetic construct
  source 1..21: mol_type = other RNA
atggcccatgaccaagcccca

SEQ ID NO: 8825 - RNA, 20 nt, synthetic construct
  source 1..20: mol_type = other RNA
atgggatgggaatacaggtg

SEQ ID NO: 8826 - RNA, 20 nt, synthetic construct
  source 1..20: mol_type = other RNA
atgggccatcagcgcgtgcg

SEQ ID NO: 8827 - RNA, 20 nt, synthetic construct
  source 1..20: mol_type = other RNA
atggggcagaatctttccac

SEQ ID NO: 8828 - RNA, 21 nt, synthetic construct
  source 1..21: mol_type = other RNA
atggggcagaatctttccacc

SEQ ID NO: 8829 - RNA, 20 nt, synthetic construct
  source 1..20: mol_type = other RNA
atggggcagcaaaacccaaa

SEQ ID NO: 8830 - RNA, 21 nt, synthetic construct
  source 1..21: mol_type = other RNA
atggtaaatatttggtaacct

SEQ ID NO: 8831 - RNA, 20 nt, synthetic construct
  source 1..20: mol_type = other RNA
atggtcccgtgctggtggtt

SEQ ID NO: 8832 - RNA, 20 nt, synthetic construct
  source 1..20: mol_type = other RNA
atggtgaggtgaacaatgct

SEQ ID NO: 8833 - RNA, 20 nt, synthetic construct
  source 1..20: mol_type = other RNA
atgtatacccaaagacaaaa

SEQ ID NO: 8834 - RNA, 21 nt, synthetic construct
  source 1..21: mol_type = other RNA
atgtcaacactaatatgggcc

SEQ ID NO: 8835 - RNA, 20 nt, synthetic construct
  source 1..20: mol_type = other RNA
atgtcaacgaccgaccttga

SEQ ID NO: 8836 - RNA, 20 nt, synthetic construct
  source 1..20: mol_type = other RNA
atgtgatgttctccatgttc

SEQ ID NO: 8837 - RNA, 20 nt, synthetic construct
  source 1..20: mol_type = other RNA
atgtggttatcctgcgttaa

SEQ ID NO: 8838 - RNA, 20 nt, synthetic construct
  source 1..20: mol_type = other RNA
atgttctccatgttcagcgc

SEQ ID NO: 8839 - RNA, 20 nt, synthetic construct
  source 1..20: mol_type = other RNA
atgttctggataataaggtt

SEQ ID NO: 8840 - RNA, 20 nt, synthetic construct
  source 1..20: mol_type = other RNA
atgttgcccaaggtcttaca

SEQ ID NO: 8841 - RNA, 20 nt, synthetic construct
  source 1..20: mol_type = other RNA
attaaagacaggtacagtag

SEQ ID NO: 8842 - RNA, 20 nt, synthetic construct
  source 1..20: mol_type = other RNA
attaaaggtctttgtactag

SEQ ID NO: 8843 - RNA, 21 nt, synthetic construct
  source 1..21: mol_type = other RNA
attaacacccacccaggtagc

SEQ ID NO: 8844 - RNA, 20 nt, synthetic construct
  source 1..20: mol_type = other RNA
attaacaggcctattgattg

SEQ ID NO: 8845 - RNA, 20 nt, synthetic construct
  source 1..20: mol_type = other RNA
attaactgtaagtgggccta

SEQ ID NO: 8846 - RNA, 20 nt, synthetic construct
  source 1..20: mol_type = other RNA
attcagcgccgacgggacgt

SEQ ID NO: 8847 - RNA, 20 nt, synthetic construct
  source 1..20: mol_type = other RNA
attccaggatcctcaaccac

SEQ ID NO: 8848 - RNA, 20 nt, synthetic construct
  source 1..20: mol_type = other RNA
attcccatcccatcatcctg

SEQ ID NO: 8849 - RNA, 20 nt, synthetic construct
  source 1..20: mol_type = other RNA
attcctatgggagtgggcct

SEQ ID NO: 8850 - RNA, 20 nt, synthetic construct
  source 1..20: mol_type = other RNA
attccttggactcataaggt

SEQ ID NO: 8851 - RNA, 20 nt, synthetic construct
  source 1..20: mol_type = other RNA
attcgcactcctccagctta

SEQ ID NO: 8852 - RNA, 20 nt, synthetic construct
  source 1..20: mol_type = other RNA
attcttgggaacaagatcta

SEQ ID NO: 8853 - RNA, 20 nt, synthetic construct
  source 1..20: mol_type = other RNA
attctttcccgaccaccagt

SEQ ID NO: 8854 - RNA, 20 nt, synthetic construct
  source 1..20: mol_type = other RNA
attgaatacatgcatacaag

SEQ ID NO: 8855 - RNA, 20 nt, synthetic construct
  source 1..20: mol_type = other RNA
attgagaccttcgtctgcga

SEQ ID NO: 8856 - RNA, 20 nt, synthetic construct
  source 1..20: mol_type = other RNA
attgagatcttctgcgacgc

SEQ ID NO: 8857 - RNA, 20 nt, synthetic construct
  source 1..20: mol_type = other RNA
attgggacttcaatcccaac

SEQ ID NO: 8858 - RNA, 20 nt, synthetic construct
  source 1..20: mol_type = other RNA
attgggggccaagtctgtac

SEQ ID NO: 8859 - RNA, 20 nt, synthetic construct
  source 1..20: mol_type = other RNA
attggtaacagcggtaaaaa

SEQ ID NO: 8860 - RNA, 20 nt, synthetic construct
  source 1..20: mol_type = other RNA
attgtgaggattcttgtcaa

SEQ ID NO: 8861 - RNA, 20 nt, synthetic construct
  source 1..20: mol_type = other RNA
attgtgggtcttttgggttt

SEQ ID NO: 8862 - RNA, 20 nt, synthetic construct
  source 1..20: mol_type = other RNA
attgtgtaaatggggcagca

SEQ ID NO: 8863 - RNA, 20 nt, synthetic construct
  source 1..20: mol_type = other RNA
atttaaaccctaacaaaaca

SEQ ID NO: 8864 - RNA, 21 nt, synthetic construct
  source 1..21: mol_type = other RNA
atttaaaccctaacaaaacaa

SEQ ID NO: 8865 - RNA, 20 nt, synthetic construct
  source 1..20: mol_type = other RNA
atttacaccaagacattatc

SEQ ID NO: 8866 - RNA, 21 nt, synthetic construct
  source 1..21: mol_type = other RNA
atttacaccaagacattatca

SEQ ID NO: 8867 - RNA, 20 nt, synthetic construct
  source 1..20: mol_type = other RNA
atttcttgtctcacttttgg

SEQ ID NO: 8868 - RNA, 20 nt, synthetic construct
  source 1..20: mol_type = other RNA
atttgcgggagaggacaaca

SEQ ID NO: 8869 - RNA, 20 nt, synthetic construct
  source 1..20: mol_type = other RNA
atttgctgtgtttgctctga

SEQ ID NO: 8870 - RNA, 20 nt, synthetic construct
  source 1..20: mol_type = other RNA
atttggaagatccagcatct

SEQ ID NO: 8871 - RNA, 20 nt, synthetic construct
  source 1..20: mol_type = other RNA
atttggtggtctataagctg

SEQ ID NO: 8872 - RNA, 21 nt, synthetic construct
  source 1..21: mol_type = other RNA
atttggtggtctataagctgg

SEQ ID NO: 8873 - RNA, 20 nt, synthetic construct
  source 1..20: mol_type = other RNA
atttggtgtctttcggagtg

SEQ ID NO: 8874 - RNA, 20 nt, synthetic construct
  source 1..20: mol_type = other RNA
atttgttcagtggttcgtag

SEQ ID NO: 8875 - RNA, 20 nt, synthetic construct
  source 1..20: mol_type = other RNA
attttatgggttatgtcatt

SEQ ID NO: 8876 - RNA, 20 nt, synthetic construct
  source 1..20: mol_type = other RNA
attttggccaagacacacgg

SEQ ID NO: 8877 - RNA, 21 nt, synthetic construct
  source 1..21: mol_type = other RNA
attttttgataatgtcttggt

SEQ ID NO: 8878 - RNA, 20 nt, synthetic construct
  source 1..20: mol_type = other RNA
caaaaaatcaaagaatgttt

SEQ ID NO: 8879 - RNA, 20 nt, synthetic construct
  source 1..20: mol_type = other RNA
caaaaaatgtgaacagtttg

SEQ ID NO: 8880 - RNA, 20 nt, synthetic construct
  source 1..20: mol_type = other RNA
caaaaacgagagtaactcca

SEQ ID NO: 8881 - RNA, 20 nt, synthetic construct
  source 1..20: mol_type = other RNA
caaaagaaaattggtaacag

SEQ ID NO: 8882 - RNA, 20 nt, synthetic construct
  source 1..20: mol_type = other RNA
caaaaggcctccgtgcggtg

SEQ ID NO: 8883 - RNA, 20 nt, synthetic construct
  source 1..20: mol_type = other RNA
caaaagtgagacaagaaatg

SEQ ID NO: 8884 - RNA, 21 nt, synthetic construct
  source 1..21: mol_type = other RNA
caaaattcgcagtccccaacc

SEQ ID NO: 8885 - RNA, 20 nt, synthetic construct
  source 1..20: mol_type = other RNA
caaacacagcaaatccagat

SEQ ID NO: 8886 - RNA, 20 nt, synthetic construct
  source 1..20: mol_type = other RNA
caaacacttggcacagacct

SEQ ID NO: 8887 - RNA, 20 nt, synthetic construct
  source 1..20: mol_type = other RNA
caaagaattgcttgcctgag

SEQ ID NO: 8888 - RNA, 20 nt, synthetic construct
  source 1..20: mol_type = other RNA
caaagacaaaagaaaattgg

SEQ ID NO: 8889 - RNA, 21 nt, synthetic construct
  source 1..21: mol_type = other RNA
caaaggacgtcccgcgcagga

SEQ ID NO: 8890 - RNA, 20 nt, synthetic construct
  source 1..20: mol_type = other RNA
caaaggtggagacagcgggg

SEQ ID NO: 8891 - RNA, 20 nt, synthetic construct
  source 1..20: mol_type = other RNA
caaagtttgtagtatgccct

SEQ ID NO: 8892 - RNA, 20 nt, synthetic construct
  source 1..20: mol_type = other RNA
caaatatacatcgtatccat

SEQ ID NO: 8893 - RNA, 20 nt, synthetic construct
  source 1..20: mol_type = other RNA
caaatatttaccattggata

SEQ ID NO: 8894 - RNA, 20 nt, synthetic construct
  source 1..20: mol_type = other RNA
caaatggcactagtaaactg

SEQ ID NO: 8895 - RNA, 20 nt, synthetic construct
  source 1..20: mol_type = other RNA
caaattaacacccacccagg

SEQ ID NO: 8896 - RNA, 21 nt, synthetic construct
  source 1..21: mol_type = other RNA
caacacatagcgcctcatttt

SEQ ID NO: 8897 - RNA, 20 nt, synthetic construct
  source 1..20: mol_type = other RNA
caacataccttgatagtcca

SEQ ID NO: 8898 - RNA, 20 nt, synthetic construct
  source 1..20: mol_type = other RNA
caacattcggtgggcgttca

SEQ ID NO: 8899 - RNA, 21 nt, synthetic construct
  source 1..21: mol_type = other RNA
caacattcggtgggcgttcac

SEQ ID NO: 8900 - RNA, 20 nt, synthetic construct
  source 1..20: mol_type = other RNA
caaccaccagcacgggacca

SEQ ID NO: 8901 - RNA, 20 nt, synthetic construct
  source 1..20: mol_type = other RNA
caacctttcaccaaactctg

SEQ ID NO: 8902 - RNA, 20 nt, synthetic construct
  source 1..20: mol_type = other RNA
caacgaattgtgggtctttt

SEQ ID NO: 8903 - RNA, 20 nt, synthetic construct
  source 1..20: mol_type = other RNA
caacttgtcctggttatcgc

SEQ ID NO: 8904 - RNA, 20 nt, synthetic construct
  source 1..20: mol_type = other RNA
caagaaatgtgaaaccacaa

SEQ ID NO: 8905 - RNA, 20 nt, synthetic construct
  source 1..20: mol_type = other RNA
caagaagatgaggcatagca

SEQ ID NO: 8906 - RNA, 21 nt, synthetic construct
  source 1..21: mol_type = other RNA
caagaagatgaggcatagcag

SEQ ID NO: 8907 - RNA, 20 nt, synthetic construct
  source 1..20: mol_type = other RNA
caagaatatggtgacccaca

SEQ ID NO: 8908 - RNA, 20 nt, synthetic construct
  source 1..20: mol_type = other RNA
caagaatcctcacaataccg

SEQ ID NO: 8909 - RNA, 20 nt, synthetic construct
  source 1..20: mol_type = other RNA
caagacattatcaaaaaatg

SEQ ID NO: 8910 - RNA, 20 nt, synthetic construct
  source 1..20: mol_type = other RNA
caagagttgcctgaacttta

SEQ ID NO: 8911 - RNA, 20 nt, synthetic construct
  source 1..20: mol_type = other RNA
caagatctacagcatggggc

SEQ ID NO: 8912 - RNA, 20 nt, synthetic construct
  source 1..20: mol_type = other RNA
caagcaattctttgctgggg

SEQ ID NO: 8913 - RNA, 20 nt, synthetic construct
  source 1..20: mol_type = other RNA
caagcctccaagctgtgcct

SEQ ID NO: 8914 - RNA, 20 nt, synthetic construct
  source 1..20: mol_type = other RNA
caaggacccataacttccaa

SEQ ID NO: 8915 - RNA, 20 nt, synthetic construct
  source 1..20: mol_type = other RNA
caaggcacagcttggaggct

SEQ ID NO: 8916 - RNA, 20 nt, synthetic construct
  source 1..20: mol_type = other RNA
caagttggaggacaggaggt

SEQ ID NO: 8917 - RNA, 21 nt, synthetic construct
  source 1..21: mol_type = other RNA
caataccgcagagtctagact

SEQ ID NO: 8918 - RNA, 20 nt, synthetic construct
  source 1..20: mol_type = other RNA
caatcaataggcctgttaat

SEQ ID NO: 8919 - RNA, 21 nt, synthetic construct
  source 1..21: mol_type = other RNA
caatcaataggcctgttaata

SEQ ID NO: 8920 - RNA, 20 nt, synthetic construct
  source 1..20: mol_type = other RNA
caatcccaacaaggacacct

SEQ ID NO: 8921 - RNA, 20 nt, synthetic construct
  source 1..20: mol_type = other RNA
caatcgccagacaggaaggc

SEQ ID NO: 8922 - RNA, 20 nt, synthetic construct
  source 1..20: mol_type = other RNA
caatctggatttgctgtgtt

SEQ ID NO: 8923 - RNA, 20 nt, synthetic construct
  source 1..20: mol_type = other RNA
caatgctcaggagactctaa

SEQ ID NO: 8924 - RNA, 20 nt, synthetic construct
  source 1..20: mol_type = other RNA
caatgtcaacgaccgacctt

SEQ ID NO: 8925 - RNA, 20 nt, synthetic construct
  source 1..20: mol_type = other RNA
caattcgttgacatactttc

SEQ ID NO: 8926 - RNA, 20 nt, synthetic construct
  source 1..20: mol_type = other RNA
cacaacctttcaccaaactc

SEQ ID NO: 8927 - RNA, 20 nt, synthetic construct
  source 1..20: mol_type = other RNA
cacaagaacacatcatacaa

SEQ ID NO: 8928 - RNA, 20 nt, synthetic construct
  source 1..20: mol_type = other RNA
cacaagagttgcctgaactt

SEQ ID NO: 8929 - RNA, 20 nt, synthetic construct
  source 1..20: mol_type = other RNA
cacacggtagttccccctag

SEQ ID NO: 8930 - RNA, 20 nt, synthetic construct
  source 1..20: mol_type = other RNA
cacacggtccggcagatgag

SEQ ID NO: 8931 - RNA, 20 nt, synthetic construct
  source 1..20: mol_type = other RNA
cacagaaaggccttgtaagt

SEQ ID NO: 8932 - RNA, 20 nt, synthetic construct
  source 1..20: mol_type = other RNA
cacagacctggccgttgccg

SEQ ID NO: 8933 - RNA, 20 nt, synthetic construct
  source 1..20: mol_type = other RNA
cacagacggggagtccgcgt

SEQ ID NO: 8934 - RNA, 20 nt, synthetic construct
  source 1..20: mol_type = other RNA
cacatagcgcctcattttgt

SEQ ID NO: 8935 - RNA, 20 nt, synthetic construct
  source 1..20: mol_type = other RNA
cacatcatacaaaaaatcaa

SEQ ID NO: 8936 - RNA, 20 nt, synthetic construct
  source 1..20: mol_type = other RNA
cacatcatccatataactga

SEQ ID NO: 8937 - RNA, 20 nt, synthetic construct
  source 1..20: mol_type = other RNA
cacatttcttgtctcacttt

SEQ ID NO: 8938 - RNA, 20 nt, synthetic construct
  source 1..20: mol_type = other RNA
cacattttttgataatgtct

SEQ ID NO: 8939 - RNA, 20 nt, synthetic construct
  source 1..20: mol_type = other RNA
caccaaactctgcaagatcc

SEQ ID NO: 8940 - RNA, 20 nt, synthetic construct
  source 1..20: mol_type = other RNA
caccaatcgccagacaggaa

SEQ ID NO: 8941 - RNA, 20 nt, synthetic construct
  source 1..20: mol_type = other RNA
gaagaactccctcgcctcgc

SEQ ID NO: 8942 - RNA, 20 nt, synthetic construct
  source 1..20: mol_type = other RNA
caccagcacgggaccatgcc

SEQ ID NO: 8943 - RNA, 20 nt, synthetic construct
  source 1..20: mol_type = other RNA
caccagttggatccagcctt

SEQ ID NO: 8944 - RNA, 20 nt, synthetic construct
  source 1..20: mol_type = other RNA
caccatactgcactcaggca

SEQ ID NO: 8945 - RNA, 20 nt, synthetic construct
  source 1..20: mol_type = other RNA
cacccaaggcacagcttgga

SEQ ID NO: 8946 - RNA, 20 nt, synthetic construct
  source 1..20: mol_type = other RNA
caccccaaaaggcctccgtg

SEQ ID NO: 8947 - RNA, 20 nt, synthetic construct
  source 1..20: mol_type = other RNA
caccgcacggaggccttttg

SEQ ID NO: 8948 - RNA, 20 nt, synthetic construct
  source 1..20: mol_type = other RNA
cacctcaccatactgcactc

SEQ ID NO: 8949 - RNA, 20 nt, synthetic construct
  source 1..20: mol_type = other RNA
cacctctgcacgtcgcatgg

SEQ ID NO: 8950 - RNA, 20 nt, synthetic construct
  source 1..20: mol_type = other RNA
cacctggccagacgccaaca

SEQ ID NO: 8951 - RNA, 20 nt, synthetic construct
  source 1..20: mol_type = other RNA
cacggaggccttttggggtg

SEQ ID NO: 8952 - RNA, 20 nt, synthetic construct
  source 1..20: mol_type = other RNA
cacggtccggcagatgagaa

SEQ ID NO: 8953 - RNA, 20 nt, synthetic construct
  source 1..20: mol_type = other RNA
cactagtaaactgagccagg

SEQ ID NO: 8954 - RNA, 20 nt, synthetic construct
  source 1..20: mol_type = other RNA
cactatttacacactctatg

SEQ ID NO: 8955 - RNA, 20 nt, synthetic construct
  source 1..20: mol_type = other RNA
cactcaggcaagcaattctt

SEQ ID NO: 8956 - RNA, 20 nt, synthetic construct
  source 1..20: mol_type = other RNA
cactcccataggaattttcc

SEQ ID NO: 8957 - RNA, 20 nt, synthetic construct
  source 1..20: mol_type = other RNA
cactgaacaaatggcactag

SEQ ID NO: 8958 - RNA, 20 nt, synthetic construct
  source 1..20: mol_type = other RNA
cactggctggggcttggtca

SEQ ID NO: 8959 - RNA, 21 nt, synthetic construct
  source 1..21: mol_type = other RNA
cactgtttggctttcagttat

SEQ ID NO: 8960 - RNA, 20 nt, synthetic construct
  source 1..20: mol_type = other RNA
cacttacagttaatgagaaa

SEQ ID NO: 8961 - RNA, 21 nt, synthetic construct
  source 1..21: mol_type = other RNA
cacttacagttaatgagaaaa

SEQ ID NO: 8962 - RNA, 20 nt, synthetic construct
  source 1..20: mol_type = other RNA
cactttctcgccaacttaca

SEQ ID NO: 8963 - RNA, 20 nt, synthetic construct
  source 1..20: mol_type = other RNA
cagaagaaccaacaagaaga

SEQ ID NO: 8964 - RNA, 20 nt, synthetic construct
  source 1..20: mol_type = other RNA
cagacacatccagcgataac

SEQ ID NO: 8965 - RNA, 20 nt, synthetic construct
  source 1..20: mol_type = other RNA
cagacctgctgcgagcaaaa

SEQ ID NO: 8966 - RNA, 20 nt, synthetic construct
  source 1..20: mol_type = other RNA
cagacctggccgttgccggg

SEQ ID NO: 8967 - RNA, 20 nt, synthetic construct
  source 1..20: mol_type = other RNA
cagacgaaggtctcaatcgc

SEQ ID NO: 8968 - RNA, 20 nt, synthetic construct
  source 1..20: mol_type = other RNA
cagacggagaaggggacgag

SEQ ID NO: 8969 - RNA, 20 nt, synthetic construct
  source 1..20: mol_type = other RNA
cagacggggagtccgcgtaa

SEQ ID NO: 8970 - RNA, 20 nt, synthetic construct
  source 1..20: mol_type = other RNA
cagagcaaacacagcaaatc

SEQ ID NO: 8971 - RNA, 20 nt, synthetic construct
  source 1..20: mol_type = other RNA
cagagctgaggcggtatcta

SEQ ID NO: 8972 - RNA, 20 nt, synthetic construct
  source 1..20: mol_type = other RNA
cagagtttggtgaaaggttg

SEQ ID NO: 8973 - RNA, 20 nt, synthetic construct
  source 1..20: mol_type = other RNA
cagatgagaaggcacagacg

SEQ ID NO: 8974 - RNA, 20 nt, synthetic construct
  source 1..20: mol_type = other RNA
cagcaaagaattgcttgcct

SEQ ID NO: 8975 - RNA, 20 nt, synthetic construct
  source 1..20: mol_type = other RNA
cagcaacaggagggatacat

SEQ ID NO: 8976 - RNA, 20 nt, synthetic construct
  source 1..20: mol_type = other RNA
cagcacagcctagcagccat

SEQ ID NO: 8977 - RNA, 20 nt, synthetic construct
  source 1..20: mol_type = other RNA
cagcaggatgaagaggaaga

SEQ ID NO: 8978 - RNA, 20 nt, synthetic construct
  source 1..20: mol_type = other RNA
cagcatggggcagaatcttt

SEQ ID NO: 8979 - RNA, 20 nt, synthetic construct
  source 1..20: mol_type = other RNA
cagccagtgggggttgcgtc

SEQ ID NO: 8980 - RNA, 20 nt, synthetic construct
  source 1..20: mol_type = other RNA
cagcctagcagccatggata

SEQ ID NO: 8981 - RNA, 21 nt, synthetic construct
  source 1..21: mol_type = other RNA
cagcctcctagtacaaagacc

SEQ ID NO: 8982 - RNA, 20 nt, synthetic construct
  source 1..20: mol_type = other RNA
cagcgataaccaggacaagt

SEQ ID NO: 8983 - RNA, 20 nt, synthetic construct
  source 1..20: mol_type = other RNA
cagcgccgacgggacgtaaa

SEQ ID NO: 8984 - RNA, 20 nt, synthetic construct
  source 1..20: mol_type = other RNA
cagcggtaaaaagggactca

SEQ ID NO: 8985 - RNA, 21 nt, synthetic construct
  source 1..21: mol_type = other RNA
cagctctgtatcgggaagcct

SEQ ID NO: 8986 - RNA, 20 nt, synthetic construct
  source 1..20: mol_type = other RNA
cagcttggaggcttgaacag

SEQ ID NO: 8987 - RNA, 20 nt, synthetic construct
  source 1..20: mol_type = other RNA
caggacaagttggaggacag

SEQ ID NO: 8988 - RNA, 20 nt, synthetic construct
  source 1..20: mol_type = other RNA
caggagactctaaggcttcc

SEQ ID NO: 8989 - RNA, 20 nt, synthetic construct
  source 1..20: mol_type = other RNA
caggaggcggatttgctggc

SEQ ID NO: 8990 - RNA, 20 nt, synthetic construct
  source 1..20: mol_type = other RNA
caggaggttggtgagtgatt

SEQ ID NO: 8991 - RNA, 20 nt, synthetic construct
  source 1..20: mol_type = other RNA
caggatccagttggcagcac

SEQ ID NO: 8992 - RNA, 20 nt, synthetic construct
  source 1..20: mol_type = other RNA
caggatgaagaggaagatga

SEQ ID NO: 8993 - RNA, 20 nt, synthetic construct
  source 1..20: mol_type = other RNA
caggcaagcaattctttgct

SEQ ID NO: 8994 - RNA, 20 nt, synthetic construct
  source 1..20: mol_type = other RNA
cagggtccccaatcctcgag

SEQ ID NO: 8995 - RNA, 20 nt, synthetic construct
  source 1..20: mol_type = other RNA
caggtacagtagaagaataa

SEQ ID NO: 8996 - RNA, 20 nt, synthetic construct
  source 1..20: mol_type = other RNA
caggtattgtttacacagaa

SEQ ID NO: 8997 - RNA, 20 nt, synthetic construct
  source 1..20: mol_type = other RNA
caggtgcaatttccgtccga

SEQ ID NO: 8998 - RNA, 20 nt, synthetic construct
  source 1..20: mol_type = other RNA
caggtgtccttgttgggatt

SEQ ID NO: 8999 - RNA, 20 nt, synthetic construct
  source 1..20: mol_type = other RNA
cagtaaagttccccacctta

SEQ ID NO: 9000 - RNA, 21 nt, synthetic construct
  source 1..21: mol_type = other RNA
cagtagaagaataaagaccag

SEQ ID NO: 9001 - RNA, 20 nt, synthetic construct
  source 1..20: mol_type = other RNA
cagtagctccaaattcttta

SEQ ID NO: 9002 - RNA, 21 nt, synthetic construct
  source 1..21: mol_type = other RNA
cagtagctccaaattctttat

SEQ ID NO: 9003 - RNA, 20 nt, synthetic construct
  source 1..20: mol_type = other RNA
cagtatggtgaggtgaacaa

SEQ ID NO: 9004 - RNA, 20 nt, synthetic construct
  source 1..20: mol_type = other RNA
cagtctttgaagtatgcctc

SEQ ID NO: 9005 - RNA, 21 nt, synthetic construct
  source 1..21: mol_type = other RNA
cagttaatgagaaaagaagat

SEQ ID NO: 9006 - RNA, 20 nt, synthetic construct
  source 1..20: mol_type = other RNA
cagttatgtcaacactaata

SEQ ID NO: 9007 - RNA, 20 nt, synthetic construct
  source 1..20: mol_type = other RNA
cagttggatccagccttcag

SEQ ID NO: 9008 - RNA, 20 nt, synthetic construct
  source 1..20: mol_type = other RNA
cagttggcagcacagcctag

SEQ ID NO: 9009 - RNA, 21 nt, synthetic construct
  source 1..21: mol_type = other RNA
cagtttgtaggcccacttaca

SEQ ID NO: 9010 - RNA, 20 nt, synthetic construct
  source 1..20: mol_type = other RNA
cataaattggtctgcgcacc

SEQ ID NO: 9011 - RNA, 20 nt, synthetic construct
  source 1..20: mol_type = other RNA
cataacccataaaattcaga

SEQ ID NO: 9012 - RNA, 20 nt, synthetic construct
  source 1..20: mol_type = other RNA
cataaggtggggaactttac

SEQ ID NO: 9013 - RNA, 20 nt, synthetic construct
  source 1..20: mol_type = other RNA
catacaagggcattaacgca

SEQ ID NO: 9014 - RNA, 20 nt, synthetic construct
  source 1..20: mol_type = other RNA
cataccttgatagtccagaa

SEQ ID NO: 9015 - RNA, 20 nt, synthetic construct
  source 1..20: mol_type = other RNA
catactacaaactttgccag

SEQ ID NO: 9016 - RNA, 20 nt, synthetic construct
  source 1..20: mol_type = other RNA
catactgcggaactcctagc

SEQ ID NO: 9017 - RNA, 20 nt, synthetic construct
  source 1..20: mol_type = other RNA
catagaggttccttgagcag

SEQ ID NO: 9018 - RNA, 20 nt, synthetic construct
  source 1..20: mol_type = other RNA
catagcagcaggatgaagag

SEQ ID NO: 9019 - RNA, 20 nt, synthetic construct
  source 1..20: mol_type = other RNA
cataggaattttccgaaagc

SEQ ID NO: 9020 - RNA, 21 nt, synthetic construct
  source 1..21: mol_type = other RNA
cataggaattttccgaaagcc

SEQ ID NO: 9021 - RNA, 20 nt, synthetic construct
  source 1..20: mol_type = other RNA
catattagtgttgacataac

SEQ ID NO: 9022 - RNA, 20 nt, synthetic construct
  source 1..20: mol_type = other RNA
catcatcctgggctttcgga

SEQ ID NO: 9023 - RNA, 20 nt, synthetic construct
  source 1..20: mol_type = other RNA
catccagcgataaccaggac

SEQ ID NO: 9024 - RNA, 20 nt, synthetic construct
  source 1..20: mol_type = other RNA
catccatataactgaaagcc

SEQ ID NO: 9025 - RNA, 21 nt, synthetic construct
  source 1..21: mol_type = other RNA
catccatataactgaaagcca

SEQ ID NO: 9026 - RNA, 20 nt, synthetic construct
  source 1..20: mol_type = other RNA
catcgtatccatggctgcta

SEQ ID NO: 9027 - RNA, 20 nt, synthetic construct
  source 1..20: mol_type = other RNA
catcttcctcttcatcctgc

SEQ ID NO: 9028 - RNA, 20 nt, synthetic construct
  source 1..20: mol_type = other RNA
catcttcttgttggttcttc

SEQ ID NO: 9029 - RNA, 20 nt, synthetic construct
  source 1..20: mol_type = other RNA
catcttgagtccctttttac

SEQ ID NO: 9030 - RNA, 20 nt, synthetic construct
  source 1..20: mol_type = other RNA
catgaccaagccccagccag

SEQ ID NO: 9031 - RNA, 21 nt, synthetic construct
  source 1..21: mol_type = other RNA
catgaccaagccccagccagt

SEQ ID NO: 9032 - RNA, 21 nt, synthetic construct
  source 1..21: mol_type = other RNA
catgcaactttttcacctctg

SEQ ID NO: 9033 - RNA, 20 nt, synthetic construct
  source 1..20: mol_type = other RNA
catgcatacaagggcattaa

SEQ ID NO: 9034 - RNA, 20 nt, synthetic construct
  source 1..20: mol_type = other RNA
catgccccaaagccacccaa

SEQ ID NO: 9035 - RNA, 20 nt, synthetic construct
  source 1..20: mol_type = other RNA
catgcgacgtgcagaggtga

SEQ ID NO: 9036 - RNA, 20 nt, synthetic construct
  source 1..20: mol_type = other RNA
catgctgtagatcttgttcc

SEQ ID NO: 9037 - RNA, 21 nt, synthetic construct
  source 1..21: mol_type = other RNA
catgctgtagatcttgttccc

SEQ ID NO: 9038 - RNA, 20 nt, synthetic construct
  source 1..20: mol_type = other RNA
catggacatcgacccttata

SEQ ID NO: 9039 - RNA, 20 nt, synthetic construct
  source 1..20: mol_type = other RNA
catggtcccgtgctggtggt

SEQ ID NO: 9040 - RNA, 21 nt, synthetic construct
  source 1..21: mol_type = other RNA
catggtcccgtgctggtggtt

SEQ ID NO: 9041 - RNA, 20 nt, synthetic construct
  source 1..20: mol_type = other RNA
catggtgctggtgcgcagac

SEQ ID NO: 9042 - RNA, 20 nt, synthetic construct
  source 1..20: mol_type = other RNA
catgttcagcgcagggtccc

SEQ ID NO: 9043 - RNA, 20 nt, synthetic construct
  source 1..20: mol_type = other RNA
cattagttccccccagcaaa

SEQ ID NO: 9044 - RNA, 20 nt, synthetic construct
  source 1..20: mol_type = other RNA
cattcggtgggcgttcacgg

SEQ ID NO: 9045 - RNA, 20 nt, synthetic construct
  source 1..20: mol_type = other RNA
cattgaggttcccgagattg

SEQ ID NO: 9046 - RNA, 21 nt, synthetic construct
  source 1..21: mol_type = other RNA
cattggaaaacaccatctttt

SEQ ID NO: 9047 - RNA, 20 nt, synthetic construct
  source 1..20: mol_type = other RNA
cattggaagttatgggtcct

SEQ ID NO: 9048 - RNA, 20 nt, synthetic construct
  source 1..20: mol_type = other RNA
cattgtgtaaatggggcagc

SEQ ID NO: 9049 - RNA, 20 nt, synthetic construct
  source 1..20: mol_type = other RNA
cattgttcacctcaccatac

SEQ ID NO: 9050 - RNA, 20 nt, synthetic construct
  source 1..20: mol_type = other RNA
catttaaaccctaacaaaac

SEQ ID NO: 9051 - RNA, 20 nt, synthetic construct
  source 1..20: mol_type = other RNA
catttacaccaagacattat

SEQ ID NO: 9052 - RNA, 20 nt, synthetic construct
  source 1..20: mol_type = other RNA
catttcttgtctcacttttg

SEQ ID NO: 9053 - RNA, 20 nt, synthetic construct
  source 1..20: mol_type = other RNA
catttggtggtctataagct

SEQ ID NO: 9054 - RNA, 20 nt, synthetic construct
  source 1..20: mol_type = other RNA
catttgttcagtggttcgta

SEQ ID NO: 9055 - RNA, 20 nt, synthetic construct
  source 1..20: mol_type = other RNA
ccaaaagacccacaattcgt

SEQ ID NO: 9056 - RNA, 20 nt, synthetic construct
  source 1..20: mol_type = other RNA
ccaaaaggcctccgtgcggt

SEQ ID NO: 9057 - RNA, 20 nt, synthetic construct
  source 1..20: mol_type = other RNA
ccaaaccttcggacggaaat

SEQ ID NO: 9058 - RNA, 20 nt, synthetic construct
  source 1..20: mol_type = other RNA
ccaaactctgcaagatccca

SEQ ID NO: 9059 - RNA, 20 nt, synthetic construct
  source 1..20: mol_type = other RNA
ccaaatatttaccattggat

SEQ ID NO: 9060 - RNA, 20 nt, synthetic construct
  source 1..20: mol_type = other RNA
ccaacaagaagatgaggcat

SEQ ID NO: 9061 - RNA, 20 nt, synthetic construct
  source 1..20: mol_type = other RNA
ccaagaatatggtgacccac

SEQ ID NO: 9062 - RNA, 20 nt, synthetic construct
  source 1..20: mol_type = other RNA
ccaagtctgtacagcatctt

SEQ ID NO: 9063 - RNA, 20 nt, synthetic construct
  source 1..20: mol_type = other RNA
ccaataccacatcatccata

SEQ ID NO: 9064 - RNA, 20 nt, synthetic construct
  source 1..20: mol_type = other RNA
ccaatcaataggcctgttaa

SEQ ID NO: 9065 - RNA, 20 nt, synthetic construct
  source 1..20: mol_type = other RNA
ccaatcctcgagaagattga

SEQ ID NO: 9066 - RNA, 20 nt, synthetic construct
  source 1..20: mol_type = other RNA
ccaatcgccagacaggaagg

SEQ ID NO: 9067 - RNA, 21 nt, synthetic construct
  source 1..21: mol_type = other RNA
ccaatgaggattaaagacagg

SEQ ID NO: 9068 - RNA, 20 nt, synthetic construct
  source 1..20: mol_type = other RNA
ccacaagaacacatcataca

SEQ ID NO: 9069 - RNA, 21 nt, synthetic construct
  source 1..21: mol_type = other RNA
ccacaattcgttgacatactt

SEQ ID NO: 9070 - RNA, 20 nt, synthetic construct
  source 1..20: mol_type = other RNA
ccacatcatccatataactg

SEQ ID NO: 9071 - RNA, 20 nt, synthetic construct
  source 1..20: mol_type = other RNA
ccacattgtgtaaatggggc

SEQ ID NO: 9072 - RNA, 20 nt, synthetic construct
  source 1..20: mol_type = other RNA
ccaccaatcgccagacagga

SEQ ID NO: 9073 - RNA, 20 nt, synthetic construct
  source 1..20: mol_type = other RNA
ccaccagcacgggaccatgc

SEQ ID NO: 9074 - RNA, 20 nt, synthetic construct
  source 1..20: mol_type = other RNA
ccacccaaggcacagcttgg

SEQ ID NO: 9075 - RNA, 20 nt, synthetic construct
  source 1..20: mol_type = other RNA
ccaccgcacggaggcctttt

SEQ ID NO: 9076 - RNA, 20 nt, synthetic construct
  source 1..20: mol_type = other RNA
ccactcccataggaattttc

SEQ ID NO: 9077 - RNA, 20 nt, synthetic construct
  source 1..20: mol_type = other RNA
ccactgcatggcctgaggat

SEQ ID NO: 9078 - RNA, 20 nt, synthetic construct
  source 1..20: mol_type = other RNA
ccacttacagttaatgagaa

SEQ ID NO: 9079 - RNA, 20 nt, synthetic construct
  source 1..20: mol_type = other RNA
ccagacgccaacaaggtagg

SEQ ID NO: 9080 - RNA, 20 nt, synthetic construct
  source 1..20: mol_type = other RNA
ccagaggattgctggtggaa

SEQ ID NO: 9081 - RNA, 20 nt, synthetic construct
  source 1..20: mol_type = other RNA
ccagattgggacttcaatcc

SEQ ID NO: 9082 - RNA, 20 nt, synthetic construct
  source 1..20: mol_type = other RNA
ccagcaaagaattgcttgcc

SEQ ID NO: 9083 - RNA, 21 nt, synthetic construct
  source 1..21: mol_type = other RNA
ccagcatctagagacctagta

SEQ ID NO: 9084 - RNA, 20 nt, synthetic construct
  source 1..20: mol_type = other RNA
ccagccagtgggggttgcgt

SEQ ID NO: 9085 - RNA, 20 nt, synthetic construct
  source 1..20: mol_type = other RNA
ccagccttcagagcaaacac

SEQ ID NO: 9086 - RNA, 21 nt, synthetic construct
  source 1..21: mol_type = other RNA
ccagccttcagagcaaacaca

SEQ ID NO: 9087 - RNA, 20 nt, synthetic construct
  source 1..20: mol_type = other RNA
ccagcttatagaccaccaaa

SEQ ID NO: 9088 - RNA, 20 nt, synthetic construct
  source 1..20: mol_type = other RNA
ccaggacaagttggaggaca

SEQ ID NO: 9089 - RNA, 21 nt, synthetic construct
  source 1..21: mol_type = other RNA
ccaggatgatgggatgggaat

SEQ ID NO: 9090 - RNA, 20 nt, synthetic construct
  source 1..20: mol_type = other RNA
ccaggtctgtgccaagtgtt

SEQ ID NO: 9091 - RNA, 20 nt, synthetic construct
  source 1..20: mol_type = other RNA
ccaggtgtccttgttgggat

SEQ ID NO: 9092 - RNA, 20 nt, synthetic construct
  source 1..20: mol_type = other RNA
ccagtgggggttgcgtcagc

SEQ ID NO: 9093 - RNA, 20 nt, synthetic construct
  source 1..20: mol_type = other RNA
ccagttggatccagccttca

SEQ ID NO: 9094 - RNA, 20 nt, synthetic construct
  source 1..20: mol_type = other RNA
ccatactgcactcaggcaag

SEQ ID NO: 9095 - RNA, 21 nt, synthetic construct
  source 1..21: mol_type = other RNA
ccatagagtgtgtaaatagtg

SEQ ID NO: 9096 - RNA, 20 nt, synthetic construct
  source 1..20: mol_type = other RNA
ccatataactgaaagccaaa

SEQ ID NO: 9097 - RNA, 20 nt, synthetic construct
  source 1..20: mol_type = other RNA
ccatcatcctgggctttcgg

SEQ ID NO: 9098 - RNA, 20 nt, synthetic construct
  source 1..20: mol_type = other RNA
ccatgcaactttttcacctc

SEQ ID NO: 9099 - RNA, 20 nt, synthetic construct
  source 1..20: mol_type = other RNA
ccatgccccaaagccaccca

SEQ ID NO: 9100 - RNA, 20 nt, synthetic construct
  source 1..20: mol_type = other RNA
ccatgcgacgtgcagaggtg

SEQ ID NO: 9101 - RNA, 20 nt, synthetic construct
  source 1..20: mol_type = other RNA
ccatggatacgatgtatatt

SEQ ID NO: 9102 - RNA, 20 nt, synthetic construct
  source 1..20: mol_type = other RNA
ccatggctgctaggctgtgc

SEQ ID NO: 9103 - RNA, 20 nt, synthetic construct
  source 1..20: mol_type = other RNA
ccatttgttcagtggttcgt

SEQ ID NO: 9104 - RNA, 20 nt, synthetic construct
  source 1..20: mol_type = other RNA
cccaaaaggcctccgtgcgg

SEQ ID NO: 9105 - RNA, 20 nt, synthetic construct
  source 1..20: mol_type = other RNA
cccaaagccacccaaggcac

SEQ ID NO: 9106 - RNA, 20 nt, synthetic construct
  source 1..20: mol_type = other RNA
cccaacaaggacacctggcc

SEQ ID NO: 9107 - RNA, 20 nt, synthetic construct
  source 1..20: mol_type = other RNA
cccaacctccaatcactcac

SEQ ID NO: 9108 - RNA, 20 nt, synthetic construct
  source 1..20: mol_type = other RNA
cccaactcctcccagtcttt

SEQ ID NO: 9109 - RNA, 20 nt, synthetic construct
  source 1..20: mol_type = other RNA
cccaagaatatggtgaccca

SEQ ID NO: 9110 - RNA, 21 nt, synthetic construct
  source 1..21: mol_type = other RNA
cccacccaggtagctagagtc

SEQ ID NO: 9111 - RNA, 20 nt, synthetic construct
  source 1..20: mol_type = other RNA
cccaccgcacggaggccttt

SEQ ID NO: 9112 - RNA, 20 nt, synthetic construct
  source 1..20: mol_type = other RNA
cccacttacagttaatgaga

SEQ ID NO: 9113 - RNA, 20 nt, synthetic construct
  source 1..20: mol_type = other RNA
cccagaggattgctggtgga

SEQ ID NO: 9114 - RNA, 20 nt, synthetic construct
  source 1..20: mol_type = other RNA
cccatcatcctgggctttcg

SEQ ID NO: 9115 - RNA, 20 nt, synthetic construct
  source 1..20: mol_type = other RNA
cccatctctttgttttgtta

SEQ ID NO: 9116 - RNA, 21 nt, synthetic construct
  source 1..21: mol_type = other RNA
ccccaaaaggcctccgtgcgg

SEQ ID NO: 9117 - RNA, 20 nt, synthetic construct
  source 1..20: mol_type = other RNA
ccccaaagccacccaaggca

SEQ ID NO: 9118 - RNA, 20 nt, synthetic construct
  source 1..20: mol_type = other RNA
ccccaactcctcccagtctt

SEQ ID NO: 9119 - RNA, 21 nt, synthetic construct
  source 1..21: mol_type = other RNA
ccccaccgcacggaggccttt

SEQ ID NO: 9120 - RNA, 20 nt, synthetic construct
  source 1..20: mol_type = other RNA
ccccaccttatgagtccaag

SEQ ID NO: 9121 - RNA, 21 nt, synthetic construct
  source 1..21: mol_type = other RNA
ccccagcaaagaattgcttgc

SEQ ID NO: 9122 - RNA, 20 nt, synthetic construct
  source 1..20: mol_type = other RNA
ccccatctctttgttttgtt

SEQ ID NO: 9123 - RNA, 20 nt, synthetic construct
  source 1..20: mol_type = other RNA
ccccccagcaaagaattgct

SEQ ID NO: 9124 - RNA, 20 nt, synthetic construct
  source 1..20: mol_type = other RNA
ccccgagaagggtcgtccgc

SEQ ID NO: 9125 - RNA, 20 nt, synthetic construct
  source 1..20: mol_type = other RNA
ccccgcctgtaacacgagaa

SEQ ID NO: 9126 - RNA, 20 nt, synthetic construct
  source 1..20: mol_type = other RNA
ccccgctgtctccacctttg

SEQ ID NO: 9127 - RNA, 20 nt, synthetic construct
  source 1..20: mol_type = other RNA
ccccgttgcccggcaacggc

SEQ ID NO: 9128 - RNA, 20 nt, synthetic construct
  source 1..20: mol_type = other RNA
ccccttctcgtgttacaggc

SEQ ID NO: 9129 - RNA, 20 nt, synthetic construct
  source 1..20: mol_type = other RNA
cccgaccaccagttggatcc

SEQ ID NO: 9130 - RNA, 20 nt, synthetic construct
  source 1..20: mol_type = other RNA
cccgagaagggtcgtccgca

SEQ ID NO: 9131 - RNA, 20 nt, synthetic construct
  source 1..20: mol_type = other RNA
cccgagattgagatcttctg

SEQ ID NO: 9132 - RNA, 20 nt, synthetic construct
  source 1..20: mol_type = other RNA
cccgcctgtaacacgagaag

SEQ ID NO: 9133 - RNA, 20 nt, synthetic construct
  source 1..20: mol_type = other RNA
cccgccttccatagagtgtg

SEQ ID NO: 9134 - RNA, 20 nt, synthetic construct
  source 1..20: mol_type = other RNA
cccgcgcaggatccagttgg

SEQ ID NO: 9135 - RNA, 20 nt, synthetic construct
  source 1..20: mol_type = other RNA
cccgctgtctccacctttga

SEQ ID NO: 9136 - RNA, 20 nt, synthetic construct
  source 1..20: mol_type = other RNA
cccggcaacggccaggtctg

SEQ ID NO: 9137 - RNA, 20 nt, synthetic construct
  source 1..20: mol_type = other RNA
cccgtcggcgctgaatcctg

SEQ ID NO: 9138 - RNA, 20 nt, synthetic construct
  source 1..20: mol_type = other RNA
cccgtctgtgccttctcatc

SEQ ID NO: 9139 - RNA, 20 nt, synthetic construct
  source 1..20: mol_type = other RNA
cccgtggtcggtcggaacgg

SEQ ID NO: 9140 - RNA, 20 nt, synthetic construct
  source 1..20: mol_type = other RNA
cccgttgcccggcaacggcc

SEQ ID NO: 9141 - RNA, 20 nt, synthetic construct
  source 1..20: mol_type = other RNA
cccgtttgtcctctaattcc

SEQ ID NO: 9142 - RNA, 20 nt, synthetic construct
  source 1..20: mol_type = other RNA
ccctaacaaaacaaagagat

SEQ ID NO: 9143 - RNA, 20 nt, synthetic construct
  source 1..20: mol_type = other RNA
ccctagaagaagaactccct

SEQ ID NO: 9144 - RNA, 20 nt, synthetic construct
  source 1..20: mol_type = other RNA
ccctatcctatcaacacttc

SEQ ID NO: 9145 - RNA, 20 nt, synthetic construct
  source 1..20: mol_type = other RNA
ccctgctggtggctccagtt

SEQ ID NO: 9146 - RNA, 20 nt, synthetic construct
  source 1..20: mol_type = other RNA
cccttatcgtcaatcttctc

SEQ ID NO: 9147 - RNA, 20 nt, synthetic construct
  source 1..20: mol_type = other RNA
cccttctccgtctgccgttc

SEQ ID NO: 9148 - RNA, 20 nt, synthetic construct
  source 1..20: mol_type = other RNA
cccttctcgtgttacaggcg

SEQ ID NO: 9149 - RNA, 20 nt, synthetic construct
  source 1..20: mol_type = other RNA
ccgaaaaggttccacgcacg

SEQ ID NO: 9150 - RNA, 21 nt, synthetic construct
  source 1..21: mol_type = other RNA
ccgaaaaggttccacgcacgc

SEQ ID NO: 9151 - RNA, 20 nt, synthetic construct
  source 1..20: mol_type = other RNA
ccgaaggtttggtacagcaa

SEQ ID NO: 9152 - RNA, 20 nt, synthetic construct
  source 1..20: mol_type = other RNA
ccgaccttgaggcatacttc

SEQ ID NO: 9153 - RNA, 20 nt, synthetic construct
  source 1..20: mol_type = other RNA
ccgcaggattcagcgccgac

SEQ ID NO: 9154 - RNA, 20 nt, synthetic construct
  source 1..20: mol_type = other RNA
gacttctctcaattttctag

SEQ ID NO: 9155 - RNA, 20 nt, synthetic construct
  source 1..20: mol_type = other RNA
ccgcctcagctctgtatcgg

SEQ ID NO: 9156 - RNA, 20 nt, synthetic construct
  source 1..20: mol_type = other RNA
ccgccttccatagagtgtgt

SEQ ID NO: 9157 - RNA, 21 nt, synthetic construct
  source 1..21: mol_type = other RNA
ccgccttccatagagtgtgta

SEQ ID NO: 9158 - RNA, 20 nt, synthetic construct
  source 1..20: mol_type = other RNA
ccgcgcaggatccagttggc

SEQ ID NO: 9159 - RNA, 20 nt, synthetic construct
  source 1..20: mol_type = other RNA
ccgctgtctccacctttgag

SEQ ID NO: 9160 - RNA, 20 nt, synthetic construct
  source 1..20: mol_type = other RNA
ccgcttgttttgctcgcagc

SEQ ID NO: 9161 - RNA, 20 nt, synthetic construct
  source 1..20: mol_type = other RNA
ccggaagtgttgataggata

SEQ ID NO: 9162 - RNA, 21 nt, synthetic construct
  source 1..21: mol_type = other RNA
ccggcaacggccaggtctgtg

SEQ ID NO: 9163 - RNA, 20 nt, synthetic construct
  source 1..20: mol_type = other RNA
ccgtcggcgctgaatcctgc

SEQ ID NO: 9164 - RNA, 20 nt, synthetic construct
  source 1..20: mol_type = other RNA
ccgtgcggtggggtgaaacc

SEQ ID NO: 9165 - RNA, 20 nt, synthetic construct
  source 1..20: mol_type = other RNA
ccgtggtcggtcggaacggc

SEQ ID NO: 9166 - RNA, 21 nt, synthetic construct
  source 1..21: mol_type = other RNA
ccgtgtgtcttggccaaaatt

SEQ ID NO: 9167 - RNA, 20 nt, synthetic construct
  source 1..20: mol_type = other RNA
ccgttgccgggcaacggggt

SEQ ID NO: 9168 - RNA, 21 nt, synthetic construct
  source 1..21: mol_type = other RNA
ccgtttctcctggctcagttt

SEQ ID NO: 9169 - RNA, 20 nt, synthetic construct
  source 1..20: mol_type = other RNA
ccgtttgtcctctaattcca

SEQ ID NO: 9170 - RNA, 20 nt, synthetic construct
  source 1..20: mol_type = other RNA
cctaacaaaacaaagagatg

SEQ ID NO: 9171 - RNA, 20 nt, synthetic construct
  source 1..20: mol_type = other RNA
cctaatatacatttacacca

SEQ ID NO: 9172 - RNA, 20 nt, synthetic construct
  source 1..20: mol_type = other RNA
cctacagcctcctagtacaa

SEQ ID NO: 9173 - RNA, 20 nt, synthetic construct
  source 1..20: mol_type = other RNA
cctacgaaccactgaacaaa

SEQ ID NO: 9174 - RNA, 20 nt, synthetic construct
  source 1..20: mol_type = other RNA
cctagaaaattgagagaagt

SEQ ID NO: 9175 - RNA, 20 nt, synthetic construct
  source 1..20: mol_type = other RNA
cctatcctatcaacacttcc

SEQ ID NO: 9176 - RNA, 20 nt, synthetic construct
  source 1..20: mol_type = other RNA
cctcaatgttagtattcctt

SEQ ID NO: 9177 - RNA, 20 nt, synthetic construct
  source 1..20: mol_type = other RNA
cctcacaataccgcagagtc

SEQ ID NO: 9178 - RNA, 20 nt, synthetic construct
  source 1..20: mol_type = other RNA
cctccaagctgtgccttggg

SEQ ID NO: 9179 - RNA, 20 nt, synthetic construct
  source 1..20: mol_type = other RNA
cctccaccaatcgccagaca

SEQ ID NO: 9180 - RNA, 20 nt, synthetic construct
  source 1..20: mol_type = other RNA
cctccagcttatagaccacc

SEQ ID NO: 9181 - RNA, 20 nt, synthetic construct
  source 1..20: mol_type = other RNA
cctcccagtctttaaacaaa

SEQ ID NO: 9182 - RNA, 20 nt, synthetic construct
  source 1..20: mol_type = other RNA
cctcctagtacaaagacctt

SEQ ID NO: 9183 - RNA, 20 nt, synthetic construct
  source 1..20: mol_type = other RNA
cctcgagaagattgacgata

SEQ ID NO: 9184 - RNA, 21 nt, synthetic construct
  source 1..21: mol_type = other RNA
cctcgcctcgcagacgaaggt

SEQ ID NO: 9185 - RNA, 20 nt, synthetic construct
  source 1..20: mol_type = other RNA
cctctatgtatccctcctgt

SEQ ID NO: 9186 - RNA, 20 nt, synthetic construct
  source 1..20: mol_type = other RNA
cctctcactctgggatcttg

SEQ ID NO: 9187 - RNA, 20 nt, synthetic construct
  source 1..20: mol_type = other RNA
cctctgccgatccatactgc

SEQ ID NO: 9188 - RNA, 20 nt, synthetic construct
  source 1..20: mol_type = other RNA
cctctgggattctttcccga

SEQ ID NO: 9189 - RNA, 20 nt, synthetic construct
  source 1..20: mol_type = other RNA
cctgaactggagccaccagc

SEQ ID NO: 9190 - RNA, 20 nt, synthetic construct
  source 1..20: mol_type = other RNA
cctgaactttaggcccatat

SEQ ID NO: 9191 - RNA, 20 nt, synthetic construct
  source 1..20: mol_type = other RNA
cctgaggatgagtgtttctc

SEQ ID NO: 9192 - RNA, 20 nt, synthetic construct
  source 1..20: mol_type = other RNA
cctgagggctccaccccaaa

SEQ ID NO: 9193 - RNA, 20 nt, synthetic construct
  source 1..20: mol_type = other RNA
cctgcatgactactgctcaa

SEQ ID NO: 9194 - RNA, 20 nt, synthetic construct
  source 1..20: mol_type = other RNA
cctgcctcgtcgtctaacaa

SEQ ID NO: 9195 - RNA, 21 nt, synthetic construct
  source 1..21: mol_type = other RNA
cctgcctcgtcgtctaacaac

SEQ ID NO: 9196 - RNA, 20 nt, synthetic construct
  source 1..20: mol_type = other RNA
cctgcggacgacccttctcg

SEQ ID NO: 9197 - RNA, 20 nt, synthetic construct
  source 1..20: mol_type = other RNA
cctgcgttaatgcccttgta

SEQ ID NO: 9198 - RNA, 20 nt, synthetic construct
  source 1..20: mol_type = other RNA
cctgctgcgagcaaaacaag

SEQ ID NO: 9199 - RNA, 20 nt, synthetic construct
  source 1..20: mol_type = other RNA
cctgctggtggctccagttc

SEQ ID NO: 9200 - RNA, 20 nt, synthetic construct
  source 1..20: mol_type = other RNA
cctggaattagaggacaaac

SEQ ID NO: 9201 - RNA, 20 nt, synthetic construct
  source 1..20: mol_type = other RNA
cctggccagacgccaacaag

SEQ ID NO: 9202 - RNA, 20 nt, synthetic construct
  source 1..20: mol_type = other RNA
cctggccgttgccgggcaac

SEQ ID NO: 9203 - RNA, 20 nt, synthetic construct
  source 1..20: mol_type = other RNA
cctgggtgggtgttaatttg

SEQ ID NO: 9204 - RNA, 20 nt, synthetic construct
  source 1..20: mol_type = other RNA
cctgtctggcgattggtgga

SEQ ID NO: 9205 - RNA, 20 nt, synthetic construct
  source 1..20: mol_type = other RNA
cctgtctttaatcctcattg

SEQ ID NO: 9206 - RNA, 20 nt, synthetic construct
  source 1..20: mol_type = other RNA
cctgttaataggaagttttc

SEQ ID NO: 9207 - RNA, 20 nt, synthetic construct
  source 1..20: mol_type = other RNA
ccttatcgtcaatcttctcg

SEQ ID NO: 9208 - RNA, 21 nt, synthetic construct
  source 1..21: mol_type = other RNA
ccttattatccagaacatcta

SEQ ID NO: 9209 - RNA, 20 nt, synthetic construct
  source 1..20: mol_type = other RNA
ccttcagtacgagatcttct

SEQ ID NO: 9210 - RNA, 20 nt, synthetic construct
  source 1..20: mol_type = other RNA
ccttccatagagtgtgtaaa

SEQ ID NO: 9211 - RNA, 20 nt, synthetic construct
  source 1..20: mol_type = other RNA
ccttcctgtctggcgattgg

SEQ ID NO: 9212 - RNA, 20 nt, synthetic construct
  source 1..20: mol_type = other RNA
ccttcgtctgcgaggcgagg

SEQ ID NO: 9213 - RNA, 20 nt, synthetic construct
  source 1..20: mol_type = other RNA
ccttgatagtccagaagaac

SEQ ID NO: 9214 - RNA, 20 nt, synthetic construct
  source 1..20: mol_type = other RNA
ccttggactcataaggtggg

SEQ ID NO: 9215 - RNA, 20 nt, synthetic construct
  source 1..20: mol_type = other RNA
ccttgggtggctttggggca

SEQ ID NO: 9216 - RNA, 20 nt, synthetic construct
  source 1..20: mol_type = other RNA
ccttgttgggattgaagtcc

SEQ ID NO: 9217 - RNA, 20 nt, synthetic construct
  source 1..20: mol_type = other RNA
cctttggataaaacctagca

SEQ ID NO: 9218 - RNA, 20 nt, synthetic construct
  source 1..20: mol_type = other RNA
ccttttggggtggagccctc

SEQ ID NO: 9219 - RNA, 20 nt, synthetic construct
  source 1..20: mol_type = other RNA
cgaaggtttggtacagcaac

SEQ ID NO: 9220 - RNA, 20 nt, synthetic construct
  source 1..20: mol_type = other RNA
cgaagtgcacacggtccggc

SEQ ID NO: 9221 - RNA, 20 nt, synthetic construct
  source 1..20: mol_type = other RNA
cgaattttggccaagacaca

SEQ ID NO: 9222 - RNA, 21 nt, synthetic construct
  source 1..21: mol_type = other RNA
cgaattttggccaagacacac

SEQ ID NO: 9223 - RNA, 20 nt, synthetic construct
  source 1..20: mol_type = other RNA
cgaccccgagaagggtcgtc

SEQ ID NO: 9224 - RNA, 20 nt, synthetic construct
  source 1..20: mol_type = other RNA
cgacccttataaagaatttg

SEQ ID NO: 9225 - RNA, 20 nt, synthetic construct
  source 1..20: mol_type = other RNA
cgacccttctcggggtcgct

SEQ ID NO: 9226 - RNA, 20 nt, synthetic construct
  source 1..20: mol_type = other RNA
cgaccttgaggcatacttca

SEQ ID NO: 9227 - RNA, 20 nt, synthetic construct
  source 1..20: mol_type = other RNA
cgacgaggcaggtcccctag

SEQ ID NO: 9228 - RNA, 20 nt, synthetic construct
  source 1..20: mol_type = other RNA
cgacgtgcagaggtgaagcg

SEQ ID NO: 9229 - RNA, 20 nt, synthetic construct
  source 1..20: mol_type = other RNA
cgagaaagtgaaagcctgct

SEQ ID NO: 9230 - RNA, 20 nt, synthetic construct
  source 1..20: mol_type = other RNA
cgagaagattgacgataagg

SEQ ID NO: 9231 - RNA, 20 nt, synthetic construct
  source 1..20: mol_type = other RNA
cgagcaaaacaagcggctag

SEQ ID NO: 9232 - RNA, 20 nt, synthetic construct
  source 1..20: mol_type = other RNA
cgaggcaggtcccctagaag

SEQ ID NO: 9233 - RNA, 20 nt, synthetic construct
  source 1..20: mol_type = other RNA
cgagggagttcttcttctag

SEQ ID NO: 9234 - RNA, 20 nt, synthetic construct
  source 1..20: mol_type = other RNA
cgataaccaggacaagttgg

SEQ ID NO: 9235 - RNA, 20 nt, synthetic construct
  source 1..20: mol_type = other RNA
cgatgtatatttgcgggaga

SEQ ID NO: 9236 - RNA, 20 nt, synthetic construct
  source 1..20: mol_type = other RNA
cgattgagaccttcgtctgc

SEQ ID NO: 9237 - RNA, 20 nt, synthetic construct
  source 1..20: mol_type = other RNA
cgattggtggaggcaggagg

SEQ ID NO: 9238 - RNA, 21 nt, synthetic construct
  source 1..21: mol_type = other RNA
cgcaacccccactggctgggg

SEQ ID NO: 9239 - RNA, 20 nt, synthetic construct
  source 1..20: mol_type = other RNA
cgcacggaggccttttgggg

SEQ ID NO: 9240 - RNA, 20 nt, synthetic construct
  source 1..20: mol_type = other RNA
cgcagaagatctcaatctcg

SEQ ID NO: 9241 - RNA, 20 nt, synthetic construct
  source 1..20: mol_type = other RNA
cgcagaccaatttatgccta

SEQ ID NO: 9242 - RNA, 20 nt, synthetic construct
  source 1..20: mol_type = other RNA
cgcagagtctagactcgtgg

SEQ ID NO: 9243 - RNA, 20 nt, synthetic construct
  source 1..20: mol_type = other RNA
cgcaggataaccacattgtg

SEQ ID NO: 9244 - RNA, 20 nt, synthetic construct
  source 1..20: mol_type = other RNA
cgcaggattcagcgccgacg

SEQ ID NO: 9245 - RNA, 20 nt, synthetic construct
  source 1..20: mol_type = other RNA
cgcagggtccccaatcctcg

SEQ ID NO: 9246 - RNA, 21 nt, synthetic construct
  source 1..21: mol_type = other RNA
cgcagggtccccaatcctcga

SEQ ID NO: 9247 - RNA, 20 nt, synthetic construct
  source 1..20: mol_type = other RNA
cgcagtatggatcggcagag

SEQ ID NO: 9248 - RNA, 20 nt, synthetic construct
  source 1..20: mol_type = other RNA
cgcatggagaccaccgtgaa

SEQ ID NO: 9249 - RNA, 20 nt, synthetic construct
  source 1..20: mol_type = other RNA
cgccaacaaggtaggagctg

SEQ ID NO: 9250 - RNA, 20 nt, synthetic construct
  source 1..20: mol_type = other RNA
cgcccaccgaatgttgccca

SEQ ID NO: 9251 - RNA, 20 nt, synthetic construct
  source 1..20: mol_type = other RNA
cgccccgtggtcggtcggaa

SEQ ID NO: 9252 - RNA, 20 nt, synthetic construct
  source 1..20: mol_type = other RNA
cgccgacgggacgtaaacaa

SEQ ID NO: 9253 - RNA, 20 nt, synthetic construct
  source 1..20: mol_type = other RNA
cgccgcgtcgcagaagatct

SEQ ID NO: 9254 - RNA, 20 nt, synthetic construct
  source 1..20: mol_type = other RNA
cgcctcagctctgtatcggg

SEQ ID NO: 9255 - RNA, 20 nt, synthetic construct
  source 1..20: mol_type = other RNA
cgcctcctgcctccaccaat

SEQ ID NO: 9256 - RNA, 20 nt, synthetic construct
  source 1..20: mol_type = other RNA
cgcctcgcagacgaaggtct

SEQ ID NO: 9257 - RNA, 20 nt, synthetic construct
  source 1..20: mol_type = other RNA
cgcgctgatggcccatgacc

SEQ ID NO: 9258 - RNA, 21 nt, synthetic construct
  source 1..21: mol_type = other RNA
cgcgtaaagagaggtgcgccc

SEQ ID NO: 9259 - RNA, 20 nt, synthetic construct
  source 1..20: mol_type = other RNA
cgcgtgcgtggaaccttttc

SEQ ID NO: 9260 - RNA, 20 nt, synthetic construct
  source 1..20: mol_type = other RNA
cggaaaattcctatgggagt

SEQ ID NO: 9261 - RNA, 20 nt, synthetic construct
  source 1..20: mol_type = other RNA
cggaaactactgttgttaga

SEQ ID NO: 9262 - RNA, 20 nt, synthetic construct
  source 1..20: mol_type = other RNA
cggaacggcagacggagaag

SEQ ID NO: 9263 - RNA, 20 nt, synthetic construct
  source 1..20: mol_type = other RNA
cggaagtgttgataggatag

SEQ ID NO: 9264 - RNA, 20 nt, synthetic construct
  source 1..20: mol_type = other RNA
cggacgacccttctcggggt

SEQ ID NO: 9265 - RNA, 20 nt, synthetic construct
  source 1..20: mol_type = other RNA
cggcagacggagaaggggac

SEQ ID NO: 9266 - RNA, 20 nt, synthetic construct
  source 1..20: mol_type = other RNA
cggcgattgagaccttcgtc

SEQ ID NO: 9267 - RNA, 20 nt, synthetic construct
  source 1..20: mol_type = other RNA
cggctaggagttccgcagta

SEQ ID NO: 9268 - RNA, 20 nt, synthetic construct
  source 1..20: mol_type = other RNA
cgggaagccttagagtctcc

SEQ ID NO: 9269 - RNA, 20 nt, synthetic construct
  source 1..20: mol_type = other RNA
cgggcaacggggtaaaggtt

SEQ ID NO: 9270 - RNA, 20 nt, synthetic construct
  source 1..20: mol_type = other RNA
cgggctgaggcccactccca

SEQ ID NO: 9271 - RNA, 21 nt, synthetic construct
  source 1..21: mol_type = other RNA
cgggctgaggcccactcccat

SEQ ID NO: 9272 - RNA, 20 nt, synthetic construct
  source 1..20: mol_type = other RNA
cgggctgggtttcaccccac

SEQ ID NO: 9273 - RNA, 20 nt, synthetic construct
  source 1..20: mol_type = other RNA
cggggagtccgcgtaaagag

SEQ ID NO: 9274 - RNA, 20 nt, synthetic construct
  source 1..20: mol_type = other RNA
cggggtttttcttgttgaca

SEQ ID NO: 9275 - RNA, 20 nt, synthetic construct
  source 1..20: mol_type = other RNA
cgggtatattatataagaga

SEQ ID NO: 9276 - RNA, 20 nt, synthetic construct
  source 1..20: mol_type = other RNA
cggtaaaaagggactcaaga

SEQ ID NO: 9277 - RNA, 20 nt, synthetic construct
  source 1..20: mol_type = other RNA
cggtcggaacggcagacgga

SEQ ID NO: 9278 - RNA, 20 nt, synthetic construct
  source 1..20: mol_type = other RNA
cggtggggtgaaacccagcc

SEQ ID NO: 9279 - RNA, 20 nt, synthetic construct
  source 1..20: mol_type = other RNA
cggtttctcttccaaaagtg

SEQ ID NO: 9280 - RNA, 20 nt, synthetic construct
  source 1..20: mol_type = other RNA
cgtaaacaaaggacgtcccg

SEQ ID NO: 9281 - RNA, 20 nt, synthetic construct
  source 1..20: mol_type = other RNA
cgtactgaaggaaagaagtc

SEQ ID NO: 9282 - RNA, 20 nt, synthetic construct
  source 1..20: mol_type = other RNA
cgtcaatcttctcgaggatt

SEQ ID NO: 9283 - RNA, 20 nt, synthetic construct
  source 1..20: mol_type = other RNA
cgtcagcaaacacttggcac

SEQ ID NO: 9284 - RNA, 20 nt, synthetic construct
  source 1..20: mol_type = other RNA
cgtcccgcgcaggatccagt

SEQ ID NO: 9285 - RNA, 20 nt, synthetic construct
  source 1..20: mol_type = other RNA
cgtccgaaggtttggtacag

SEQ ID NO: 9286 - RNA, 20 nt, synthetic construct
  source 1..20: mol_type = other RNA
cgtcgcatggagaccaccgt

SEQ ID NO: 9287 - RNA, 20 nt, synthetic construct
  source 1..20: mol_type = other RNA
cgtctaacaacagtagtttc

SEQ ID NO: 9288 - RNA, 21 nt, synthetic construct
  source 1..21: mol_type = other RNA
cgtctaacaacagtagtttcc

SEQ ID NO: 9289 - RNA, 21 nt, synthetic construct
  source 1..21: mol_type = other RNA
cgtctggccaggtgtccttgt

SEQ ID NO: 9290 - RNA, 20 nt, synthetic construct
  source 1..20: mol_type = other RNA
cgtgaacgcccaccgaatgt

SEQ ID NO: 9291 - RNA, 20 nt, synthetic construct
  source 1..20: mol_type = other RNA
cgtgcagaggtgaagcgaag

SEQ ID NO: 9292 - RNA, 20 nt, synthetic construct
  source 1..20: mol_type = other RNA
cgtgcggtggggtgaaaccc

SEQ ID NO: 9293 - RNA, 21 nt, synthetic construct
  source 1..21: mol_type = other RNA
cgtgctggtggttgaggatcc

SEQ ID NO: 9294 - RNA, 20 nt, synthetic construct
  source 1..20: mol_type = other RNA
cgtgtgtcttggccaaaatt

SEQ ID NO: 9295 - RNA, 20 nt, synthetic construct
  source 1..20: mol_type = other RNA
cgttcacggtggtctccatg

SEQ ID NO: 9296 - RNA, 20 nt, synthetic construct
  source 1..20: mol_type = other RNA
cgttccgaccgaccacgggg

SEQ ID NO: 9297 - RNA, 20 nt, synthetic construct
  source 1..20: mol_type = other RNA
cgttgacattgcagagagtc

SEQ ID NO: 9298 - RNA, 21 nt, synthetic construct
  source 1..21: mol_type = other RNA
cgttgacattgcagagagtcc

SEQ ID NO: 9299 - RNA, 20 nt, synthetic construct
  source 1..20: mol_type = other RNA
cgttgccgggcaacggggta

SEQ ID NO: 9300 - RNA, 20 nt, synthetic construct
  source 1..20: mol_type = other RNA
ctaacaacagtagtttccgg

SEQ ID NO: 9301 - RNA, 20 nt, synthetic construct
  source 1..20: mol_type = other RNA
ctaatatgggcctaaagttc

SEQ ID NO: 9302 - RNA, 21 nt, synthetic construct
  source 1..21: mol_type = other RNA
ctaatgactctagctacctgg

SEQ ID NO: 9303 - RNA, 20 nt, synthetic construct
  source 1..20: mol_type = other RNA
ctaccttgttggcgtctggc

SEQ ID NO: 9304 - RNA, 20 nt, synthetic construct
  source 1..20: mol_type = other RNA
ctacgaaccactgaacaaat

SEQ ID NO: 9305 - RNA, 20 nt, synthetic construct
  source 1..20: mol_type = other RNA
ctactaggtctctagatgct

SEQ ID NO: 9306 - RNA, 20 nt, synthetic construct
  source 1..20: mol_type = other RNA
ctactgttgttagacgacga

SEQ ID NO: 9307 - RNA, 21 nt, synthetic construct
  source 1..21: mol_type = other RNA
ctactgttgttagacgacgag

SEQ ID NO: 9308 - RNA, 20 nt, synthetic construct
  source 1..20: mol_type = other RNA
ctagaagatctcgtactgaa

SEQ ID NO: 9309 - RNA, 21 nt, synthetic construct
  source 1..21: mol_type = other RNA
gctgctatgcctcatcttctt

SEQ ID NO: 9310 - RNA, 20 nt, synthetic construct
  source 1..20: mol_type = other RNA
ctagactctgcggtattgtg

SEQ ID NO: 9311 - RNA, 20 nt, synthetic construct
  source 1..20: mol_type = other RNA
ctagagtcattagttccccc

SEQ ID NO: 9312 - RNA, 20 nt, synthetic construct
  source 1..20: mol_type = other RNA
ctagcaggcataatcaattg

SEQ ID NO: 9313 - RNA, 20 nt, synthetic construct
  source 1..20: mol_type = other RNA
ctagccgcttgttttgctcg

SEQ ID NO: 9314 - RNA, 20 nt, synthetic construct
  source 1..20: mol_type = other RNA
ctagctacctgggtgggtgt

SEQ ID NO: 9315 - RNA, 21 nt, synthetic construct
  source 1..21: mol_type = other RNA
ctaggttttatccaaaggtta

SEQ ID NO: 9316 - RNA, 20 nt, synthetic construct
  source 1..20: mol_type = other RNA
ctagtaaactgagccaggag

SEQ ID NO: 9317 - RNA, 21 nt, synthetic construct
  source 1..21: mol_type = other RNA
ctagtagtcagttatgtcaac

SEQ ID NO: 9318 - RNA, 20 nt, synthetic construct
  source 1..20: mol_type = other RNA
ctataacggtttctcttcca

SEQ ID NO: 9319 - RNA, 20 nt, synthetic construct
  source 1..20: mol_type = other RNA
ctatcctatcaacacttccg

SEQ ID NO: 9320 - RNA, 21 nt, synthetic construct
  source 1..21: mol_type = other RNA
ctatgtgttgtttctctctta

SEQ ID NO: 9321 - RNA, 20 nt, synthetic construct
  source 1..20: mol_type = other RNA
ctattaacaggcctattgat

SEQ ID NO: 9322 - RNA, 20 nt, synthetic construct
  source 1..20: mol_type = other RNA
ctattgattggaaagtatgt

SEQ ID NO: 9323 - RNA, 20 nt, synthetic construct
  source 1..20: mol_type = other RNA
ctatttacacactctatgga

SEQ ID NO: 9324 - RNA, 20 nt, synthetic construct
  source 1..20: mol_type = other RNA
ctcaagatgctgtacagact

SEQ ID NO: 9325 - RNA, 20 nt, synthetic construct
  source 1..20: mol_type = other RNA
ctcaatcgccgcgtcgcaga

SEQ ID NO: 9326 - RNA, 21 nt, synthetic construct
  source 1..21: mol_type = other RNA
ctcaatctcgggaacctcaat

SEQ ID NO: 9327 - RNA, 20 nt, synthetic construct
  source 1..20: mol_type = other RNA
ctcacaataccgcagagtct

SEQ ID NO: 9328 - RNA, 20 nt, synthetic construct
  source 1..20: mol_type = other RNA
ctcaccaacctcctgtcctc

SEQ ID NO: 9329 - RNA, 20 nt, synthetic construct
  source 1..20: mol_type = other RNA
ctcaccatactgcactcagg

SEQ ID NO: 9330 - RNA, 20 nt, synthetic construct
  source 1..20: mol_type = other RNA
ctcaggctcagggcatacta

SEQ ID NO: 9331 - RNA, 20 nt, synthetic construct
  source 1..20: mol_type = other RNA
ctcatcctcaggccatgcag

SEQ ID NO: 9332 - RNA, 20 nt, synthetic construct
  source 1..20: mol_type = other RNA
ctccaacttgtcctggttat

SEQ ID NO: 9333 - RNA, 20 nt, synthetic construct
  source 1..20: mol_type = other RNA
ctccaagctgtgccttgggt

SEQ ID NO: 9334 - RNA, 20 nt, synthetic construct
  source 1..20: mol_type = other RNA
ctccaccaatcgccagacag

SEQ ID NO: 9335 - RNA, 21 nt, synthetic construct
  source 1..21: mol_type = other RNA
ctccaccccaaaaggcctccg

SEQ ID NO: 9336 - RNA, 20 nt, synthetic construct
  source 1..20: mol_type = other RNA
ctccagacctgctgcgagca

SEQ ID NO: 9337 - RNA, 20 nt, synthetic construct
  source 1..20: mol_type = other RNA
ctccatgcgacgtgcagagg

SEQ ID NO: 9338 - RNA, 21 nt, synthetic construct
  source 1..21: mol_type = other RNA
ctccatgttcagcgcagggtc

SEQ ID NO: 9339 - RNA, 20 nt, synthetic construct
  source 1..20: mol_type = other RNA
ctcccataggaattttccga

SEQ ID NO: 9340 - RNA, 20 nt, synthetic construct
  source 1..20: mol_type = other RNA
ctccctcgcctcgcagacga

SEQ ID NO: 9341 - RNA, 20 nt, synthetic construct
  source 1..20: mol_type = other RNA
ctcctaccttgttggcgtct

SEQ ID NO: 9342 - RNA, 20 nt, synthetic construct
  source 1..20: mol_type = other RNA
ctcctgcctccaccaatcgc

SEQ ID NO: 9343 - RNA, 20 nt, synthetic construct
  source 1..20: mol_type = other RNA
ctcctggctcagtttactag

SEQ ID NO: 9344 - RNA, 20 nt, synthetic construct
  source 1..20: mol_type = other RNA
ctcgagaagattgacgataa

SEQ ID NO: 9345 - RNA, 20 nt, synthetic construct
  source 1..20: mol_type = other RNA
ctcgaggattggggaccctg

SEQ ID NO: 9346 - RNA, 20 nt, synthetic construct
  source 1..20: mol_type = other RNA
ctctaaggcttcccgataca

SEQ ID NO: 9347 - RNA, 20 nt, synthetic construct
  source 1..20: mol_type = other RNA
ctctagatgctggatcttcc

SEQ ID NO: 9348 - RNA, 20 nt, synthetic construct
  source 1..20: mol_type = other RNA
ctctataacggtttctcttc

SEQ ID NO: 9349 - RNA, 21 nt, synthetic construct
  source 1..21: mol_type = other RNA
ctctataacggtttctcttcc

SEQ ID NO: 9350 - RNA, 20 nt, synthetic construct
  source 1..20: mol_type = other RNA
ctctcactctgggatcttgc

SEQ ID NO: 9351 - RNA, 20 nt, synthetic construct
  source 1..20: mol_type = other RNA
ctctcgtccccttctccgtc

SEQ ID NO: 9352 - RNA, 20 nt, synthetic construct
  source 1..20: mol_type = other RNA
ctctctgcaatgtcaacgac

SEQ ID NO: 9353 - RNA, 20 nt, synthetic construct
  source 1..20: mol_type = other RNA
ctctgaaggctggatccaac

SEQ ID NO: 9354 - RNA, 21 nt, synthetic construct
  source 1..21: mol_type = other RNA
ctctgaaggctggatccaact

SEQ ID NO: 9355 - RNA, 20 nt, synthetic construct
  source 1..20: mol_type = other RNA
ctctgcaagatcccagagtg

SEQ ID NO: 9356 - RNA, 20 nt, synthetic construct
  source 1..20: mol_type = other RNA
ctctgccgatccatactgcg

SEQ ID NO: 9357 - RNA, 20 nt, synthetic construct
  source 1..20: mol_type = other RNA
ctctgggatcttgcagagtt

SEQ ID NO: 9358 - RNA, 21 nt, synthetic construct
  source 1..21: mol_type = other RNA
ctctgggattctttcccgacc

SEQ ID NO: 9359 - RNA, 20 nt, synthetic construct
  source 1..20: mol_type = other RNA
ctctgtatcgggaagcctta

SEQ ID NO: 9360 - RNA, 20 nt, synthetic construct
  source 1..20: mol_type = other RNA
ctcttatgtaagaccttggg

SEQ ID NO: 9361 - RNA, 20 nt, synthetic construct
  source 1..20: mol_type = other RNA
ctcttccaaaagtgagacaa

SEQ ID NO: 9362 - RNA, 20 nt, synthetic construct
  source 1..20: mol_type = other RNA
ctctttgttttgttagggtt

SEQ ID NO: 9363 - RNA, 20 nt, synthetic construct
  source 1..20: mol_type = other RNA
ctgaaagccaaacagtgggg

SEQ ID NO: 9364 - RNA, 20 nt, synthetic construct
  source 1..20: mol_type = other RNA
ctgaactggagccaccagca

SEQ ID NO: 9365 - RNA, 21 nt, synthetic construct
  source 1..21: mol_type = other RNA
ctgaactggagccaccagcag

SEQ ID NO: 9366 - RNA, 20 nt, synthetic construct
  source 1..20: mol_type = other RNA
ctgaaggaaagaagtcagaa

SEQ ID NO: 9367 - RNA, 20 nt, synthetic construct
  source 1..20: mol_type = other RNA
ctgacgcaacccccactggc

SEQ ID NO: 9368 - RNA, 20 nt, synthetic construct
  source 1..20: mol_type = other RNA
ctgactactaggtctctaga

SEQ ID NO: 9369 - RNA, 20 nt, synthetic construct
  source 1..20: mol_type = other RNA
ctgacttctttccttcagta

SEQ ID NO: 9370 - RNA, 20 nt, synthetic construct
  source 1..20: mol_type = other RNA
ctgagccaggagaaacgggc

SEQ ID NO: 9371 - RNA, 20 nt, synthetic construct
  source 1..20: mol_type = other RNA
ctgaggatgagtgtttctca

SEQ ID NO: 9372 - RNA, 20 nt, synthetic construct
  source 1..20: mol_type = other RNA
ctgagggctccaccccaaaa

SEQ ID NO: 9373 - RNA, 20 nt, synthetic construct
  source 1..20: mol_type = other RNA
ctgagtgcagtatggtgagg

SEQ ID NO: 9374 - RNA, 20 nt, synthetic construct
  source 1..20: mol_type = other RNA
ctgcaagatcccagagtgag

SEQ ID NO: 9375 - RNA, 20 nt, synthetic construct
  source 1..20: mol_type = other RNA
ctgcatgactactgctcaag

SEQ ID NO: 9376 - RNA, 20 nt, synthetic construct
  source 1..20: mol_type = other RNA
ctgccaactggatcctgcgc

SEQ ID NO: 9377 - RNA, 20 nt, synthetic construct
  source 1..20: mol_type = other RNA
ctgccggaccgtgtgcactt

SEQ ID NO: 9378 - RNA, 20 nt, synthetic construct
  source 1..20: mol_type = other RNA
ctgccgttccgaccgaccac

SEQ ID NO: 9379 - RNA, 20 nt, synthetic construct
  source 1..20: mol_type = other RNA
ctgcctccaccaatcgccag

SEQ ID NO: 9380 - RNA, 20 nt, synthetic construct
  source 1..20: mol_type = other RNA
ctgccttcctgtctggcgat

SEQ ID NO: 9381 - RNA, 21 nt, synthetic construct
  source 1..21: mol_type = other RNA
ctgcgaattttggccaagaca

SEQ ID NO: 9382 - RNA, 20 nt, synthetic construct
  source 1..20: mol_type = other RNA
ctgcgagcaaaacaagcggc

SEQ ID NO: 9383 - RNA, 21 nt, synthetic construct
  source 1..21: mol_type = other RNA
ctgcgagcaaaacaagcggct

SEQ ID NO: 9384 - RNA, 20 nt, synthetic construct
  source 1..20: mol_type = other RNA
ctgctgcgagcaaaacaagc

SEQ ID NO: 9385 - RNA, 20 nt, synthetic construct
  source 1..20: mol_type = other RNA
ctgctggtggctccagttca

SEQ ID NO: 9386 - RNA, 20 nt, synthetic construct
  source 1..20: mol_type = other RNA
ctggaattagaggacaaacg

SEQ ID NO: 9387 - RNA, 20 nt, synthetic construct
  source 1..20: mol_type = other RNA
ctggatccaactggtggtcg

SEQ ID NO: 9388 - RNA, 20 nt, synthetic construct
  source 1..20: mol_type = other RNA
ctggccagacgccaacaagg

SEQ ID NO: 9389 - RNA, 20 nt, synthetic construct
  source 1..20: mol_type = other RNA
ctggccaggtgtccttgttg

SEQ ID NO: 9390 - RNA, 20 nt, synthetic construct
  source 1..20: mol_type = other RNA
ctggccgttgccgggcaacg

SEQ ID NO: 9391 - RNA, 20 nt, synthetic construct
  source 1..20: mol_type = other RNA
ctggcgattggtggaggcag

SEQ ID NO: 9392 - RNA, 20 nt, synthetic construct
  source 1..20: mol_type = other RNA
ctggctggggcttggtcatg

SEQ ID NO: 9393 - RNA, 20 nt, synthetic construct
  source 1..20: mol_type = other RNA
ctgggaggagttgggggagg

SEQ ID NO: 9394 - RNA, 20 nt, synthetic construct
  source 1..20: mol_type = other RNA
ctggggggaactaatgactc

SEQ ID NO: 9395 - RNA, 20 nt, synthetic construct
  source 1..20: mol_type = other RNA
ctgggtgggtgttaatttgg

SEQ ID NO: 9396 - RNA, 20 nt, synthetic construct
  source 1..20: mol_type = other RNA
ctgggtttcaccccaccgca

SEQ ID NO: 9397 - RNA, 20 nt, synthetic construct
  source 1..20: mol_type = other RNA
ctggtgcgcagaccaattta

SEQ ID NO: 9398 - RNA, 20 nt, synthetic construct
  source 1..20: mol_type = other RNA
ctgtaacacgagaaggggtc

SEQ ID NO: 9399 - RNA, 20 nt, synthetic construct
  source 1..20: mol_type = other RNA
ctgtacagacttggccccca

SEQ ID NO: 9400 - RNA, 20 nt, synthetic construct
  source 1..20: mol_type = other RNA
ctgtaccaaaccttcggacg

SEQ ID NO: 9401 - RNA, 21 nt, synthetic construct
  source 1..21: mol_type = other RNA
ctgtatttccctgctggtggc

SEQ ID NO: 9402 - RNA, 20 nt, synthetic construct
  source 1..20: mol_type = other RNA
ctgtctggcgattggtggag

SEQ ID NO: 9403 - RNA, 20 nt, synthetic construct
  source 1..20: mol_type = other RNA
ctgtctttaatcctcattgg

SEQ ID NO: 9404 - RNA, 20 nt, synthetic construct
  source 1..20: mol_type = other RNA
ctgtgccaagtgtttgctga

SEQ ID NO: 9405 - RNA, 20 nt, synthetic construct
  source 1..20: mol_type = other RNA
ctgtgccttgggtggctttg

SEQ ID NO: 9406 - RNA, 20 nt, synthetic construct
  source 1..20: mol_type = other RNA
ctgtgctgccaactggatcc

SEQ ID NO: 9407 - RNA, 20 nt, synthetic construct
  source 1..20: mol_type = other RNA
ctgtgtttgctctgaaggct

SEQ ID NO: 9408 - RNA, 20 nt, synthetic construct
  source 1..20: mol_type = other RNA
ctgttaataggaagttttct

SEQ ID NO: 9409 - RNA, 20 nt, synthetic construct
  source 1..20: mol_type = other RNA
ctgttcaagcctccaagctg

SEQ ID NO: 9410 - RNA, 20 nt, synthetic construct
  source 1..20: mol_type = other RNA
ctgttgctgtaccaaacctt

SEQ ID NO: 9411 - RNA, 20 nt, synthetic construct
  source 1..20: mol_type = other RNA
ctgttgttagacgacgaggc

SEQ ID NO: 9412 - RNA, 20 nt, synthetic construct
  source 1..20: mol_type = other RNA
ctgtttggctttcagttata

SEQ ID NO: 9413 - RNA, 20 nt, synthetic construct
  source 1..20: mol_type = other RNA
ctgtttgtttaaagactggg

SEQ ID NO: 9414 - RNA, 20 nt, synthetic construct
  source 1..20: mol_type = other RNA
cttacaaggcctttctgtgt

SEQ ID NO: 9415 - RNA, 21 nt, synthetic construct
  source 1..21: mol_type = other RNA
cttacaaggcctttctgtgta

SEQ ID NO: 9416 - RNA, 20 nt, synthetic construct
  source 1..20: mol_type = other RNA
cttacagttaatgagaaaag

SEQ ID NO: 9417 - RNA, 20 nt, synthetic construct
  source 1..20: mol_type = other RNA
cttatccaatggtaaatatt

SEQ ID NO: 9418 - RNA, 20 nt, synthetic construct
  source 1..20: mol_type = other RNA
cttatcgtcaatcttctcga

SEQ ID NO: 9419 - RNA, 20 nt, synthetic construct
  source 1..20: mol_type = other RNA
cttatgagtccaaggaatac

SEQ ID NO: 9420 - RNA, 20 nt, synthetic construct
  source 1..20: mol_type = other RNA
cttcaaagactgtttgttta

SEQ ID NO: 9421 - RNA, 20 nt, synthetic construct
  source 1..20: mol_type = other RNA
cttcacctctgcacgtcgca

SEQ ID NO: 9422 - RNA, 20 nt, synthetic construct
  source 1..20: mol_type = other RNA
cttccaaattaacacccacc

SEQ ID NO: 9423 - RNA, 20 nt, synthetic construct
  source 1..20: mol_type = other RNA
cttccaatgacataacccat

SEQ ID NO: 9424 - RNA, 20 nt, synthetic construct
  source 1..20: mol_type = other RNA
cttccggaaactactgttgt

SEQ ID NO: 9425 - RNA, 20 nt, synthetic construct
  source 1..20: mol_type = other RNA
cttcctattaacaggcctat

SEQ ID NO: 9426 - RNA, 20 nt, synthetic construct
  source 1..20: mol_type = other RNA
cttcctgtctggcgattggt

SEQ ID NO: 9427 - RNA, 20 nt, synthetic construct
  source 1..20: mol_type = other RNA
cttctctcaattttctaggg

SEQ ID NO: 9428 - RNA, 20 nt, synthetic construct
  source 1..20: mol_type = other RNA
cttctgcgacgcggcgattg

SEQ ID NO: 9429 - RNA, 20 nt, synthetic construct
  source 1..20: mol_type = other RNA
cttcttttctcattaactgt

SEQ ID NO: 9430 - RNA, 20 nt, synthetic construct
  source 1..20: mol_type = other RNA
cttgaacagtaggacatgaa

SEQ ID NO: 9431 - RNA, 20 nt, synthetic construct
  source 1..20: mol_type = other RNA
cttgcctgagtgcagtatgg

SEQ ID NO: 9432 - RNA, 20 nt, synthetic construct
  source 1..20: mol_type = other RNA
cttggcacagacctggccgt

SEQ ID NO: 9433 - RNA, 20 nt, synthetic construct
  source 1..20: mol_type = other RNA
cttgggtggctttggggcat

SEQ ID NO: 9434 - RNA, 20 nt, synthetic construct
  source 1..20: mol_type = other RNA
cttggtgtaaatgtatatta

SEQ ID NO: 9435 - RNA, 20 nt, synthetic construct
  source 1..20: mol_type = other RNA
cttgtaagttggcgagaaag

SEQ ID NO: 9436 - RNA, 20 nt, synthetic construct
  source 1..20: mol_type = other RNA
cttgtcaacaagaaaaaccc

SEQ ID NO: 9437 - RNA, 20 nt, synthetic construct
  source 1..20: mol_type = other RNA
cttgtctcacttttggaaga

SEQ ID NO: 9438 - RNA, 20 nt, synthetic construct
  source 1..20: mol_type = other RNA
cttgttcatgtcctactgtt

SEQ ID NO: 9439 - RNA, 20 nt, synthetic construct
  source 1..20: mol_type = other RNA
cttgttgacaagaatcctca

SEQ ID NO: 9440 - RNA, 20 nt, synthetic construct
  source 1..20: mol_type = other RNA
ctttaaacaaacagtctttg

SEQ ID NO: 9441 - RNA, 20 nt, synthetic construct
  source 1..20: mol_type = other RNA
ctttaggcccatattagtgt

SEQ ID NO: 9442 - RNA, 20 nt, synthetic construct
  source 1..20: mol_type = other RNA
ctttccaccagcaatcctct

SEQ ID NO: 9443 - RNA, 20 nt, synthetic construct
  source 1..20: mol_type = other RNA
ctttcggaaaattcctatgg

SEQ ID NO: 9444 - RNA, 20 nt, synthetic construct
  source 1..20: mol_type = other RNA
ctttctgtgtaaacaatacc

SEQ ID NO: 9445 - RNA, 20 nt, synthetic construct
  source 1..20: mol_type = other RNA
ctttgagaaacactcatcct

SEQ ID NO: 9446 - RNA, 21 nt, synthetic construct
  source 1..21: mol_type = other RNA
ctttggataaaacctagcagg

SEQ ID NO: 9447 - RNA, 20 nt, synthetic construct
  source 1..20: mol_type = other RNA
ctttgtactaggaggctgta

SEQ ID NO: 9448 - RNA, 20 nt, synthetic construct
  source 1..20: mol_type = other RNA
ctttgtttacgtcccgtcgg

SEQ ID NO: 9449 - RNA, 20 nt, synthetic construct
  source 1..20: mol_type = other RNA
cttttctcattaactgtaag

SEQ ID NO: 9450 - RNA, 21 nt, synthetic construct
  source 1..21: mol_type = other RNA
cttttggaagagaaaccgtta

SEQ ID NO: 9451 - RNA, 20 nt, synthetic construct
  source 1..20: mol_type = other RNA
cttttggggtggagccctca

SEQ ID NO: 9452 - RNA, 20 nt, synthetic construct
  source 1..20: mol_type = other RNA
gaaaaaccccgcctgtaaca

SEQ ID NO: 9453 - RNA, 20 nt, synthetic construct
  source 1..20: mol_type = other RNA
gaaaagatggtgttttccaa

SEQ ID NO: 9454 - RNA, 21 nt, synthetic construct
  source 1..21: mol_type = other RNA
gaaaagatggtgttttccaat

SEQ ID NO: 9455 - RNA, 21 nt, synthetic construct
  source 1..21: mol_type = other RNA
gaaaattgagagaagtccacc

SEQ ID NO: 9456 - RNA, 20 nt, synthetic construct
  source 1..20: mol_type = other RNA
gaaaattggtaacagcggta

SEQ ID NO: 9457 - RNA, 21 nt, synthetic construct
  source 1..21: mol_type = other RNA
gaaacactcatcctcaggcca

SEQ ID NO: 9458 - RNA, 20 nt, synthetic construct
  source 1..20: mol_type = other RNA
gaaacccagcccgaatgctc

SEQ ID NO: 9459 - RNA, 20 nt, synthetic construct
  source 1..20: mol_type = other RNA
gaaagacaccaaatactcta

SEQ ID NO: 9460 - RNA, 21 nt, synthetic construct
  source 1..21: mol_type = other RNA
gaaagacaccaaatactctat

SEQ ID NO: 9461 - RNA, 20 nt, synthetic construct
  source 1..20: mol_type = other RNA
gaaagccaaacagtggggga

SEQ ID NO: 9462 - RNA, 20 nt, synthetic construct
  source 1..20: mol_type = other RNA
gaaagcccaggatgatggga

SEQ ID NO: 9463 - RNA, 21 nt, synthetic construct
  source 1..21: mol_type = other RNA
gaaagcccaggatgatgggat

SEQ ID NO: 9464 - RNA, 21 nt, synthetic construct
  source 1..21: mol_type = other RNA
gaaagccctacgaaccactga

SEQ ID NO: 9465 - RNA, 20 nt, synthetic construct
  source 1..20: mol_type = other RNA
gaaaggccttgtaagttggc

SEQ ID NO: 9466 - RNA, 20 nt, synthetic construct
  source 1..20: mol_type = other RNA
gaaagtatgtcaacgaattg

SEQ ID NO: 9467 - RNA, 21 nt, synthetic construct
  source 1..21: mol_type = other RNA
gaaagtgaaagcctgcttaga

SEQ ID NO: 9468 - RNA, 20 nt, synthetic construct
  source 1..20: mol_type = other RNA
gaaatacaggcctctcactc

SEQ ID NO: 9469 - RNA, 20 nt, synthetic construct
  source 1..20: mol_type = other RNA
gaacaagagatgattaggca

SEQ ID NO: 9470 - RNA, 20 nt, synthetic construct
  source 1..20: mol_type = other RNA
gaacaagatctacagcatgg

SEQ ID NO: 9471 - RNA, 20 nt, synthetic construct
  source 1..20: mol_type = other RNA
gaacaatgctcaggagactc

SEQ ID NO: 9472 - RNA, 20 nt, synthetic construct
  source 1..20: mol_type = other RNA
gaacacatcatacaaaaaat

SEQ ID NO: 9473 - RNA, 20 nt, synthetic construct
  source 1..20: mol_type = other RNA
gaacagggtttactgctcct

SEQ ID NO: 9474 - RNA, 20 nt, synthetic construct
  source 1..20: mol_type = other RNA
gaacagtaggacatgaacaa

SEQ ID NO: 9475 - RNA, 20 nt, synthetic construct
  source 1..20: mol_type = other RNA
gaacatcacatcaggattcc

SEQ ID NO: 9476 - RNA, 20 nt, synthetic construct
  source 1..20: mol_type = other RNA
gaacatggagaacatcacat

SEQ ID NO: 9477 - RNA, 20 nt, synthetic construct
  source 1..20: mol_type = other RNA
gaacctgcatgactactgct

SEQ ID NO: 9478 - RNA, 20 nt, synthetic construct
  source 1..20: mol_type = other RNA
gaacctttaccccgttgccc

SEQ ID NO: 9479 - RNA, 21 nt, synthetic construct
  source 1..21: mol_type = other RNA
gaacgcccaccgaatgttgcc

SEQ ID NO: 9480 - RNA, 20 nt, synthetic construct
  source 1..20: mol_type = other RNA
gaactaccgtgtgtcttggc

SEQ ID NO: 9481 - RNA, 20 nt, synthetic construct
  source 1..20: mol_type = other RNA
gaactccctcgcctcgcaga

SEQ ID NO: 9482 - RNA, 20 nt, synthetic construct
  source 1..20: mol_type = other RNA
ggacttctctcaattttcta

SEQ ID NO: 9483 - RNA, 20 nt, synthetic construct
  source 1..20: mol_type = other RNA
gaactcctagccgcttgttt

SEQ ID NO: 9484 - RNA, 20 nt, synthetic construct
  source 1..20: mol_type = other RNA
gaactggagccaccagcagg

SEQ ID NO: 9485 - RNA, 20 nt, synthetic construct
  source 1..20: mol_type = other RNA
gaagaaccaacaagaagatg

SEQ ID NO: 9486 - RNA, 21 nt, synthetic construct
  source 1..21: mol_type = other RNA
gtccaccacgagtctagactc

SEQ ID NO: 9487 - RNA, 20 nt, synthetic construct
  source 1..20: mol_type = other RNA
gaagaagaactccctcgcct

SEQ ID NO: 9488 - RNA, 21 nt, synthetic construct
  source 1..21: mol_type = other RNA
gaagatctcaatctcgggaac

SEQ ID NO: 9489 - RNA, 20 nt, synthetic construct
  source 1..20: mol_type = other RNA
gaagatctcgtactgaagga

SEQ ID NO: 9490 - RNA, 21 nt, synthetic construct
  source 1..21: mol_type = other RNA
gaagatctcgtactgaaggaa

SEQ ID NO: 9491 - RNA, 20 nt, synthetic construct
  source 1..20: mol_type = other RNA
gaagatgaggcatagcagca

SEQ ID NO: 9492 - RNA, 20 nt, synthetic construct
  source 1..20: mol_type = other RNA
gaagattgacgataagggag

SEQ ID NO: 9493 - RNA, 21 nt, synthetic construct
  source 1..21: mol_type = other RNA
gaagattgacgataagggaga

SEQ ID NO: 9494 - RNA, 20 nt, synthetic construct
  source 1..20: mol_type = other RNA
gaagcgaagtgcacacggtc

SEQ ID NO: 9495 - RNA, 20 nt, synthetic construct
  source 1..20: mol_type = other RNA
gaaggaaagaagtcagaagg

SEQ ID NO: 9496 - RNA, 20 nt, synthetic construct
  source 1..20: mol_type = other RNA
gaaggcacagacggggagtc

SEQ ID NO: 9497 - RNA, 20 nt, synthetic construct
  source 1..20: mol_type = other RNA
gaaggcgggtatattatata

SEQ ID NO: 9498 - RNA, 20 nt, synthetic construct
  source 1..20: mol_type = other RNA
gaaggggacgagagagtccc

SEQ ID NO: 9499 - RNA, 20 nt, synthetic construct
  source 1..20: mol_type = other RNA
gaagggtcgtccgcaggatt

SEQ ID NO: 9500 - RNA, 20 nt, synthetic construct
  source 1..20: mol_type = other RNA
gaaggtctcaatcgccgcgt

SEQ ID NO: 9501 - RNA, 20 nt, synthetic construct
  source 1..20: mol_type = other RNA
gaaggtttggtacagcaaca

SEQ ID NO: 9502 - RNA, 20 nt, synthetic construct
  source 1..20: mol_type = other RNA
gaagtcagaaggcaaaaacg

SEQ ID NO: 9503 - RNA, 20 nt, synthetic construct
  source 1..20: mol_type = other RNA
gaagttatgggtccttgcca

SEQ ID NO: 9504 - RNA, 21 nt, synthetic construct
  source 1..21: mol_type = other RNA
gaatactaacattgaggttcc

SEQ ID NO: 9505 - RNA, 20 nt, synthetic construct
  source 1..20: mol_type = other RNA
gaatatggtgacccacaaaa

SEQ ID NO: 9506 - RNA, 21 nt, synthetic construct
  source 1..21: mol_type = other RNA
gaatccacactccgaaagaca

SEQ ID NO: 9507 - RNA, 20 nt, synthetic construct
  source 1..20: mol_type = other RNA
gaatcccagaggattgctgg

SEQ ID NO: 9508 - RNA, 21 nt, synthetic construct
  source 1..21: mol_type = other RNA
gaattgcttgcctgagtgcag

SEQ ID NO: 9509 - RNA, 20 nt, synthetic construct
  source 1..20: mol_type = other RNA
gacaaaagaaaattggtaac

SEQ ID NO: 9510 - RNA, 20 nt, synthetic construct
  source 1..20: mol_type = other RNA
gacaaacgggcaacatacct

SEQ ID NO: 9511 - RNA, 21 nt, synthetic construct
  source 1..21: mol_type = other RNA
gacaaacgggcaacatacctt

SEQ ID NO: 9512 - RNA, 20 nt, synthetic construct
  source 1..20: mol_type = other RNA
gacaacagagttatcagtcc

SEQ ID NO: 9513 - RNA, 21 nt, synthetic construct
  source 1..21: mol_type = other RNA
gacaacagagttatcagtccc

SEQ ID NO: 9514 - RNA, 20 nt, synthetic construct
  source 1..20: mol_type = other RNA
gacaagaaatgtgaaaccac

SEQ ID NO: 9515 - RNA, 20 nt, synthetic construct
  source 1..20: mol_type = other RNA
gacaagaatcctcacaatac

SEQ ID NO: 9516 - RNA, 20 nt, synthetic construct
  source 1..20: mol_type = other RNA
gacacacggtagttccccct

SEQ ID NO: 9517 - RNA, 21 nt, synthetic construct
  source 1..21: mol_type = other RNA
gacacacggtagttcccccta

SEQ ID NO: 9518 - RNA, 20 nt, synthetic construct
  source 1..20: mol_type = other RNA
gacacatccagcgataacca

SEQ ID NO: 9519 - RNA, 20 nt, synthetic construct
  source 1..20: mol_type = other RNA
gacacctggccagacgccaa

SEQ ID NO: 9520 - RNA, 20 nt, synthetic construct
  source 1..20: mol_type = other RNA
gacactatttacacactcta

SEQ ID NO: 9521 - RNA, 20 nt, synthetic construct
  source 1..20: mol_type = other RNA
gacaggaaggcagcctaccc

SEQ ID NO: 9522 - RNA, 20 nt, synthetic construct
  source 1..20: mol_type = other RNA
gacaggtacagtagaagaat

SEQ ID NO: 9523 - RNA, 20 nt, synthetic construct
  source 1..20: mol_type = other RNA
gacataacccataaaattca

SEQ ID NO: 9524 - RNA, 20 nt, synthetic construct
  source 1..20: mol_type = other RNA
gacatactttccaatcaata

SEQ ID NO: 9525 - RNA, 20 nt, synthetic construct
  source 1..20: mol_type = other RNA
gacatgaacaagagatgatt

SEQ ID NO: 9526 - RNA, 20 nt, synthetic construct
  source 1..20: mol_type = other RNA
gaccaagccccagccagtgg

SEQ ID NO: 9527 - RNA, 20 nt, synthetic construct
  source 1..20: mol_type = other RNA
gaccaccgtgaacgcccacc

SEQ ID NO: 9528 - RNA, 20 nt, synthetic construct
  source 1..20: mol_type = other RNA
gaccccgagaagggtcgtcc

SEQ ID NO: 9529 - RNA, 21 nt, synthetic construct
  source 1..21: mol_type = other RNA
gaccccgagaagggtcgtccg

SEQ ID NO: 9530 - RNA, 21 nt, synthetic construct
  source 1..21: mol_type = other RNA
gaccccttctcgtgttacagg

SEQ ID NO: 9531 - RNA, 20 nt, synthetic construct
  source 1..20: mol_type = other RNA
gaccctgcgctgaacatgga

SEQ ID NO: 9532 - RNA, 20 nt, synthetic construct
  source 1..20: mol_type = other RNA
gacccttataaagaatttgg

SEQ ID NO: 9533 - RNA, 20 nt, synthetic construct
  source 1..20: mol_type = other RNA
gacccttctcggggtcgctt

SEQ ID NO: 9534 - RNA, 20 nt, synthetic construct
  source 1..20: mol_type = other RNA
gacctagtagtcagttatgt

SEQ ID NO: 9535 - RNA, 20 nt, synthetic construct
  source 1..20: mol_type = other RNA
gacctgctgcgagcaaaaca

SEQ ID NO: 9536 - RNA, 21 nt, synthetic construct
  source 1..21: mol_type = other RNA
gacctggccgttgccgggcaa

SEQ ID NO: 9537 - RNA, 20 nt, synthetic construct
  source 1..20: mol_type = other RNA
gaccttcgtctgcgaggcga

SEQ ID NO: 9538 - RNA, 20 nt, synthetic construct
  source 1..20: mol_type = other RNA
gaccttgaggcatacttcaa

SEQ ID NO: 9539 - RNA, 20 nt, synthetic construct
  source 1..20: mol_type = other RNA
gaccttgggcaacattcggt

SEQ ID NO: 9540 - RNA, 20 nt, synthetic construct
  source 1..20: mol_type = other RNA
gacgacgaggcaggtcccct

SEQ ID NO: 9541 - RNA, 20 nt, synthetic construct
  source 1..20: mol_type = other RNA
gacgaggcaggtcccctaga

SEQ ID NO: 9542 - RNA, 20 nt, synthetic construct
  source 1..20: mol_type = other RNA
gacgcaacccccactggctg

SEQ ID NO: 9543 - RNA, 20 nt, synthetic construct
  source 1..20: mol_type = other RNA
gacgccaacaaggtaggagc

SEQ ID NO: 9544 - RNA, 20 nt, synthetic construct
  source 1..20: mol_type = other RNA
gacggggagtccgcgtaaag

SEQ ID NO: 9545 - RNA, 20 nt, synthetic construct
  source 1..20: mol_type = other RNA
gacgtaaacaaaggacgtcc

SEQ ID NO: 9546 - RNA, 21 nt, synthetic construct
  source 1..21: mol_type = other RNA
gactactgcctctcccttatc

SEQ ID NO: 9547 - RNA, 20 nt, synthetic construct
  source 1..20: mol_type = other RNA
gactcgtggtggacttctct

SEQ ID NO: 9548 - RNA, 20 nt, synthetic construct
  source 1..20: mol_type = other RNA
gactctaaggcttcccgata

SEQ ID NO: 9549 - RNA, 20 nt, synthetic construct
  source 1..20: mol_type = other RNA
gactgggaggagttggggga

SEQ ID NO: 9550 - RNA, 20 nt, synthetic construct
  source 1..20: mol_type = other RNA
gactgtttgtttaaagactg

SEQ ID NO: 9551 - RNA, 20 nt, synthetic construct
  source 1..20: mol_type = other RNA
gttccgcagtatggatcggc

SEQ ID NO: 9552 - RNA, 20 nt, synthetic construct
  source 1..20: mol_type = other RNA
gacttctttccttcagtacg

SEQ ID NO: 9553 - RNA, 20 nt, synthetic construct
  source 1..20: mol_type = other RNA
gagaaagtgaaagcctgctt

SEQ ID NO: 9554 - RNA, 20 nt, synthetic construct
  source 1..20: mol_type = other RNA
gagaagattgacgataaggg

SEQ ID NO: 9555 - RNA, 21 nt, synthetic construct
  source 1..21: mol_type = other RNA
taaaacgccgcagacacatcc

SEQ ID NO: 9556 - RNA, 20 nt, synthetic construct
  source 1..20: mol_type = other RNA
gagaccttcgtctgcgaggc

SEQ ID NO: 9557 - RNA, 20 nt, synthetic construct
  source 1..20: mol_type = other RNA
gagagagtcccaagcgaccc

SEQ ID NO: 9558 - RNA, 20 nt, synthetic construct
  source 1..20: mol_type = other RNA
gagaggcagtagtcggaaca

SEQ ID NO: 9559 - RNA, 21 nt, synthetic construct
  source 1..21: mol_type = other RNA
gagagtaactccacagtagct

SEQ ID NO: 9560 - RNA, 20 nt, synthetic construct
  source 1..20: mol_type = other RNA
gagagtcccaagcgaccccg

SEQ ID NO: 9561 - RNA, 20 nt, synthetic construct
  source 1..20: mol_type = other RNA
gagatgattaggcagaggtg

SEQ ID NO: 9562 - RNA, 21 nt, synthetic construct
  source 1..21: mol_type = other RNA
gagatgattaggcagaggtga

SEQ ID NO: 9563 - RNA, 20 nt, synthetic construct
  source 1..20: mol_type = other RNA
gagattgagatcttctgcga

SEQ ID NO: 9564 - RNA, 20 nt, synthetic construct
  source 1..20: mol_type = other RNA
gagcagtagtcatgcaggtt

SEQ ID NO: 9565 - RNA, 20 nt, synthetic construct
  source 1..20: mol_type = other RNA
gagccaccagcagggaaata

SEQ ID NO: 9566 - RNA, 20 nt, synthetic construct
  source 1..20: mol_type = other RNA
gagccaggagaaacgggctg

SEQ ID NO: 9567 - RNA, 20 nt, synthetic construct
  source 1..20: mol_type = other RNA
gagcctgagggctccacccc

SEQ ID NO: 9568 - RNA, 20 nt, synthetic construct
  source 1..20: mol_type = other RNA
gagctgaggcggtatctaga

SEQ ID NO: 9569 - RNA, 21 nt, synthetic construct
  source 1..21: mol_type = other RNA
gaggacaaacgggcaacatac

SEQ ID NO: 9570 - RNA, 21 nt, synthetic construct
  source 1..21: mol_type = other RNA
gaggacaacagagttatcagt

SEQ ID NO: 9571 - RNA, 20 nt, synthetic construct
  source 1..20: mol_type = other RNA
gaggacaggaggttggtgag

SEQ ID NO: 9572 - RNA, 20 nt, synthetic construct
  source 1..20: mol_type = other RNA
gaggactcttggactctctg

SEQ ID NO: 9573 - RNA, 20 nt, synthetic construct
  source 1..20: mol_type = other RNA
gaggagccgaaaaggttcca

SEQ ID NO: 9574 - RNA, 20 nt, synthetic construct
  source 1..20: mol_type = other RNA
gaggagttgggggaggagat

SEQ ID NO: 9575 - RNA, 20 nt, synthetic construct
  source 1..20: mol_type = other RNA
gaggattcttgtcaacaaga

SEQ ID NO: 9576 - RNA, 20 nt, synthetic construct
  source 1..20: mol_type = other RNA
gaggattggggaccctgcgc

SEQ ID NO: 9577 - RNA, 20 nt, synthetic construct
  source 1..20: mol_type = other RNA
gaggcaggaggcggatttgc

SEQ ID NO: 9578 - RNA, 20 nt, synthetic construct
  source 1..20: mol_type = other RNA
gaggcaggtcccctagaaga

SEQ ID NO: 9579 - RNA, 20 nt, synthetic construct
  source 1..20: mol_type = other RNA
gaggcatagcagcaggatga

SEQ ID NO: 9580 - RNA, 20 nt, synthetic construct
  source 1..20: mol_type = other RNA
gaggcttgaacagtaggaca

SEQ ID NO: 9581 - RNA, 20 nt, synthetic construct
  source 1..20: mol_type = other RNA
gagggagttcttcttctagg

SEQ ID NO: 9582 - RNA, 20 nt, synthetic construct
  source 1..20: mol_type = other RNA
gaggtgaaaaagttgcatgg

SEQ ID NO: 9583 - RNA, 21 nt, synthetic construct
  source 1..21: mol_type = other RNA
gaggtgaaaaagttgcatggt

SEQ ID NO: 9584 - RNA, 20 nt, synthetic construct
  source 1..20: mol_type = other RNA
gaggtgaagcgaagtgcaca

SEQ ID NO: 9585 - RNA, 20 nt, synthetic construct
  source 1..20: mol_type = other RNA
gagtaactccacagtagctc

SEQ ID NO: 9586 - RNA, 20 nt, synthetic construct
  source 1..20: mol_type = other RNA
gagtcattagttccccccag

SEQ ID NO: 9587 - RNA, 21 nt, synthetic construct
  source 1..21: mol_type = other RNA
gagtccaaggaatactaacat

SEQ ID NO: 9588 - RNA, 20 nt, synthetic construct
  source 1..20: mol_type = other RNA
gagtcccaagcgaccccgag

SEQ ID NO: 9589 - RNA, 21 nt, synthetic construct
  source 1..21: mol_type = other RNA
gagtccctttttaccgctgtt

SEQ ID NO: 9590 - RNA, 20 nt, synthetic construct
  source 1..20: mol_type = other RNA
gagtgcgaatccacactccg

SEQ ID NO: 9591 - RNA, 20 nt, synthetic construct
  source 1..20: mol_type = other RNA
gagtttggtgaaaggttgtg

SEQ ID NO: 9592 - RNA, 20 nt, synthetic construct
  source 1..20: mol_type = other RNA
gataaccacattgtgtaaat

SEQ ID NO: 9593 - RNA, 20 nt, synthetic construct
  source 1..20: mol_type = other RNA
gataaccaggacaagttgga

SEQ ID NO: 9594 - RNA, 20 nt, synthetic construct
  source 1..20: mol_type = other RNA
gataagggagaggcagtagt

SEQ ID NO: 9595 - RNA, 20 nt, synthetic construct
  source 1..20: mol_type = other RNA
gataatgtttgctccagacc

SEQ ID NO: 9596 - RNA, 20 nt, synthetic construct
  source 1..20: mol_type = other RNA
gatacgatgtatatttgcgg

SEQ ID NO: 9597 - RNA, 20 nt, synthetic construct
  source 1..20: mol_type = other RNA
gataggataggggcatttgg

SEQ ID NO: 9598 - RNA, 20 nt, synthetic construct
  source 1..20: mol_type = other RNA
gatagtccagaagaaccaac

SEQ ID NO: 9599 - RNA, 20 nt, synthetic construct
  source 1..20: mol_type = other RNA
gatccaactggtggtcggga

SEQ ID NO: 9600 - RNA, 20 nt, synthetic construct
  source 1..20: mol_type = other RNA
gatccatactgcggaactcc

SEQ ID NO: 9601 - RNA, 20 nt, synthetic construct
  source 1..20: mol_type = other RNA
gatcctcaaccaccagcacg

SEQ ID NO: 9602 - RNA, 20 nt, synthetic construct
  source 1..20: mol_type = other RNA
gatcggcagaggagccgaaa

SEQ ID NO: 9603 - RNA, 20 nt, synthetic construct
  source 1..20: mol_type = other RNA
gatctcaatctcgggaacct

SEQ ID NO: 9604 - RNA, 20 nt, synthetic construct
  source 1..20: mol_type = other RNA
gatctcgtactgaaggaaag

SEQ ID NO: 9605 - RNA, 20 nt, synthetic construct
  source 1..20: mol_type = other RNA
gatcttctagataccgcctc

SEQ ID NO: 9606 - RNA, 20 nt, synthetic construct
  source 1..20: mol_type = other RNA
gatcttgcagagtttggtga

SEQ ID NO: 9607 - RNA, 20 nt, synthetic construct
  source 1..20: mol_type = other RNA
gatgagaaggcacagacggg

SEQ ID NO: 9608 - RNA, 20 nt, synthetic construct
  source 1..20: mol_type = other RNA
gatgaggcatagcagcagga

SEQ ID NO: 9609 - RNA, 20 nt, synthetic construct
  source 1..20: mol_type = other RNA
gatgagtgtttctcaaaggt

SEQ ID NO: 9610 - RNA, 20 nt, synthetic construct
  source 1..20: mol_type = other RNA
gatgatgtggtattgggggc

SEQ ID NO: 9611 - RNA, 20 nt, synthetic construct
  source 1..20: mol_type = other RNA
gatgattaggcagaggtgaa

SEQ ID NO: 9612 - RNA, 20 nt, synthetic construct
  source 1..20: mol_type = other RNA
gatggcccatgaccaagccc

SEQ ID NO: 9613 - RNA, 20 nt, synthetic construct
  source 1..20: mol_type = other RNA
gatgtgatgttctccatgtt

SEQ ID NO: 9614 - RNA, 20 nt, synthetic construct
  source 1..20: mol_type = other RNA
gatgttctccatgttcagcg

SEQ ID NO: 9615 - RNA, 20 nt, synthetic construct
  source 1..20: mol_type = other RNA
gattaaagacaggtacagta

SEQ ID NO: 9616 - RNA, 21 nt, synthetic construct
  source 1..21: mol_type = other RNA
gattaaagacaggtacagtag

SEQ ID NO: 9617 - RNA, 20 nt, synthetic construct
  source 1..20: mol_type = other RNA
gattaaaggtctttgtacta

SEQ ID NO: 9618 - RNA, 20 nt, synthetic construct
  source 1..20: mol_type = other RNA
gattaactagatgttctgga

SEQ ID NO: 9619 - RNA, 20 nt, synthetic construct
  source 1..20: mol_type = other RNA
gattcagcgccgacgggacg

SEQ ID NO: 9620 - RNA, 20 nt, synthetic construct
  source 1..20: mol_type = other RNA
gattgaatacatgcatacaa

SEQ ID NO: 9621 - RNA, 20 nt, synthetic construct
  source 1..20: mol_type = other RNA
gattgacgataagggagagg

SEQ ID NO: 9622 - RNA, 21 nt, synthetic construct
  source 1..21: mol_type = other RNA
gattgacgataagggagaggc

SEQ ID NO: 9623 - RNA, 20 nt, synthetic construct
  source 1..20: mol_type = other RNA
gattgagaccttcgtctgcg

SEQ ID NO: 9624 - RNA, 20 nt, synthetic construct
  source 1..20: mol_type = other RNA
gattgagatcttctgcgacg

SEQ ID NO: 9625 - RNA, 21 nt, synthetic construct
  source 1..21: mol_type = other RNA
gattgagatcttctgcgacgc

SEQ ID NO: 9626 - RNA, 21 nt, synthetic construct
  source 1..21: mol_type = other RNA
gattgcaattgattatgcctg

SEQ ID NO: 9627 - RNA, 20 nt, synthetic construct
  source 1..20: mol_type = other RNA
gattgctggtggaaagattc

SEQ ID NO: 9628 - RNA, 20 nt, synthetic construct
  source 1..20: mol_type = other RNA
gattggaggttggggactgc

SEQ ID NO: 9629 - RNA, 20 nt, synthetic construct
  source 1..20: mol_type = other RNA
gattgggacttcaatcccaa

SEQ ID NO: 9630 - RNA, 20 nt, synthetic construct
  source 1..20: mol_type = other RNA
gattggtggaggcaggaggc

SEQ ID NO: 9631 - RNA, 20 nt, synthetic construct
  source 1..20: mol_type = other RNA
gatttgctgtgtttgctctg

SEQ ID NO: 9632 - RNA, 20 nt, synthetic construct
  source 1..20: mol_type = other RNA
gcaaacacttggcacagacc

SEQ ID NO: 9633 - RNA, 20 nt, synthetic construct
  source 1..20: mol_type = other RNA
gcaaacattatcgggactga

SEQ ID NO: 9634 - RNA, 21 nt, synthetic construct
  source 1..21: mol_type = other RNA
gcaaagaattgcttgcctgag

SEQ ID NO: 9635 - RNA, 20 nt, synthetic construct
  source 1..20: mol_type = other RNA
gcaaagtttgtagtatgccc

SEQ ID NO: 9636 - RNA, 20 nt, synthetic construct
  source 1..20: mol_type = other RNA
gcaaatatacatcgtatcca

SEQ ID NO: 9637 - RNA, 20 nt, synthetic construct
  source 1..20: mol_type = other RNA
gcaaatccagattgggactt

SEQ ID NO: 9638 - RNA, 21 nt, synthetic construct
  source 1..21: mol_type = other RNA
gcaaatccgcctcctgcctcc

SEQ ID NO: 9639 - RNA, 20 nt, synthetic construct
  source 1..20: mol_type = other RNA
gcaacaggagggatacatag

SEQ ID NO: 9640 - RNA, 20 nt, synthetic construct
  source 1..20: mol_type = other RNA
gcaacataccttgatagtcc

SEQ ID NO: 9641 - RNA, 20 nt, synthetic construct
  source 1..20: mol_type = other RNA
gcaacggccaggtctgtgcc

SEQ ID NO: 9642 - RNA, 20 nt, synthetic construct
  source 1..20: mol_type = other RNA
gcaactttttcacctctgcc

SEQ ID NO: 9643 - RNA, 20 nt, synthetic construct
  source 1..20: mol_type = other RNA
gcaagcaattctttgctggg

SEQ ID NO: 9644 - RNA, 20 nt, synthetic construct
  source 1..20: mol_type = other RNA
gcaatgtcaacgaccgacct

SEQ ID NO: 9645 - RNA, 20 nt, synthetic construct
  source 1..20: mol_type = other RNA
gcaatttccgtccgaaggtt

SEQ ID NO: 9646 - RNA, 20 nt, synthetic construct
  source 1..20: mol_type = other RNA
gcacacggtccggcagatga

SEQ ID NO: 9647 - RNA, 20 nt, synthetic construct
  source 1..20: mol_type = other RNA
gcacagacctggccgttgcc

SEQ ID NO: 9648 - RNA, 20 nt, synthetic construct
  source 1..20: mol_type = other RNA
gcacagacggggagtccgcg

SEQ ID NO: 9649 - RNA, 21 nt, synthetic construct
  source 1..21: mol_type = other RNA
gcacagcctagcagccatgga

SEQ ID NO: 9650 - RNA, 20 nt, synthetic construct
  source 1..20: mol_type = other RNA
gcacagcttggaggcttgaa

SEQ ID NO: 9651 - RNA, 20 nt, synthetic construct
  source 1..20: mol_type = other RNA
gcacggaggccttttggggt

SEQ ID NO: 9652 - RNA, 20 nt, synthetic construct
  source 1..20: mol_type = other RNA
gcacgggaccatgccgaacc

SEQ ID NO: 9653 - RNA, 20 nt, synthetic construct
  source 1..20: mol_type = other RNA
gcactagtaaactgagccag

SEQ ID NO: 9654 - RNA, 20 nt, synthetic construct
  source 1..20: mol_type = other RNA
gcactcctccagcttataga

SEQ ID NO: 9655 - RNA, 20 nt, synthetic construct
  source 1..20: mol_type = other RNA
gcagaagatctcaatctcgg

SEQ ID NO: 9656 - RNA, 20 nt, synthetic construct
  source 1..20: mol_type = other RNA
gcagacacatccagcgataa

SEQ ID NO: 9657 - RNA, 20 nt, synthetic construct
  source 1..20: mol_type = other RNA
gcagaccaatttatgcctac

SEQ ID NO: 9658 - RNA, 20 nt, synthetic construct
  source 1..20: mol_type = other RNA
gcagacggagaaggggacga

SEQ ID NO: 9659 - RNA, 20 nt, synthetic construct
  source 1..20: mol_type = other RNA
gcagaggtgaaaaagttgca

SEQ ID NO: 9660 - RNA, 21 nt, synthetic construct
  source 1..21: mol_type = other RNA
gcagaggtgaagcgaagtgca

SEQ ID NO: 9661 - RNA, 20 nt, synthetic construct
  source 1..20: mol_type = other RNA
gcagagtctagactcgtggt

SEQ ID NO: 9662 - RNA, 20 nt, synthetic construct
  source 1..20: mol_type = other RNA
gcagatgagaaggcacagac

SEQ ID NO: 9663 - RNA, 21 nt, synthetic construct
  source 1..21: mol_type = other RNA
gcagatgagaaggcacagacg

SEQ ID NO: 9664 - RNA, 20 nt, synthetic construct
  source 1..20: mol_type = other RNA
gcagcacagcctagcagcca

SEQ ID NO: 9665 - RNA, 20 nt, synthetic construct
  source 1..20: mol_type = other RNA
gcaggaggcggatttgctgg

SEQ ID NO: 9666 - RNA, 20 nt, synthetic construct
  source 1..20: mol_type = other RNA
gcaggataaccacattgtgt

SEQ ID NO: 9667 - RNA, 20 nt, synthetic construct
  source 1..20: mol_type = other RNA
gcaggatccagttggcagca

SEQ ID NO: 9668 - RNA, 20 nt, synthetic construct
  source 1..20: mol_type = other RNA
gcaggctttcactttctcgc

SEQ ID NO: 9669 - RNA, 20 nt, synthetic construct
  source 1..20: mol_type = other RNA
gcagggtccccaatcctcga

SEQ ID NO: 9670 - RNA, 20 nt, synthetic construct
  source 1..20: mol_type = other RNA
gcaggttcggcatggtcccg

SEQ ID NO: 9671 - RNA, 21 nt, synthetic construct
  source 1..21: mol_type = other RNA
gcaggttcggcatggtcccgt

SEQ ID NO: 9672 - RNA, 21 nt, synthetic construct
  source 1..21: mol_type = other RNA
gcagtagtcatgcaggttcgg

SEQ ID NO: 9673 - RNA, 20 nt, synthetic construct
  source 1..20: mol_type = other RNA
gcagtatggatcggcagagg

SEQ ID NO: 9674 - RNA, 20 nt, synthetic construct
  source 1..20: mol_type = other RNA
gcataaattggtctgcgcac

SEQ ID NO: 9675 - RNA, 20 nt, synthetic construct
  source 1..20: mol_type = other RNA
gcatacaagggcattaacgc

SEQ ID NO: 9676 - RNA, 20 nt, synthetic construct
  source 1..20: mol_type = other RNA
gcatagcagcaggatgaaga

SEQ ID NO: 9677 - RNA, 21 nt, synthetic construct
  source 1..21: mol_type = other RNA
gcatagcagcaggatgaagag

SEQ ID NO: 9678 - RNA, 20 nt, synthetic construct
  source 1..20: mol_type = other RNA
gcatctagagacctagtagt

SEQ ID NO: 9679 - RNA, 20 nt, synthetic construct
  source 1..20: mol_type = other RNA
gcatggacatcgacccttat

SEQ ID NO: 9680 - RNA, 21 nt, synthetic construct
  source 1..21: mol_type = other RNA
gcatggacatcgacccttata

SEQ ID NO: 9681 - RNA, 20 nt, synthetic construct
  source 1..20: mol_type = other RNA
gcatgtattcaatctaagca

SEQ ID NO: 9682 - RNA, 20 nt, synthetic construct
  source 1..20: mol_type = other RNA
gcatttggtggtctataagc

SEQ ID NO: 9683 - RNA, 20 nt, synthetic construct
  source 1..20: mol_type = other RNA
gccaacaaggtaggagctgg

SEQ ID NO: 9684 - RNA, 20 nt, synthetic construct
  source 1..20: mol_type = other RNA
gccaagtctgtacagcatct

SEQ ID NO: 9685 - RNA, 20 nt, synthetic construct
  source 1..20: mol_type = other RNA
gccacaagaacacatcatac

SEQ ID NO: 9686 - RNA, 21 nt, synthetic construct
  source 1..21: mol_type = other RNA
gccacaagaacacatcataca

SEQ ID NO: 9687 - RNA, 20 nt, synthetic construct
  source 1..20: mol_type = other RNA
gccaccagcagggaaataca

SEQ ID NO: 9688 - RNA, 20 nt, synthetic construct
  source 1..20: mol_type = other RNA
gccacccaaggcacagcttg

SEQ ID NO: 9689 - RNA, 20 nt, synthetic construct
  source 1..20: mol_type = other RNA
gccagacgccaacaaggtag

SEQ ID NO: 9690 - RNA, 21 nt, synthetic construct
  source 1..21: mol_type = other RNA
gccaggtgtccttgttgggat

SEQ ID NO: 9691 - RNA, 20 nt, synthetic construct
  source 1..20: mol_type = other RNA
gccagtgggggttgcgtcag

SEQ ID NO: 9692 - RNA, 20 nt, synthetic construct
  source 1..20: mol_type = other RNA
gccatttgttcagtggttcg

SEQ ID NO: 9693 - RNA, 20 nt, synthetic construct
  source 1..20: mol_type = other RNA
gcccaaggtcttacataaga

SEQ ID NO: 9694 - RNA, 20 nt, synthetic construct
  source 1..20: mol_type = other RNA
gcccacttacagttaatgag

SEQ ID NO: 9695 - RNA, 20 nt, synthetic construct
  source 1..20: mol_type = other RNA
gcccatgaccaagccccagc

SEQ ID NO: 9696 - RNA, 20 nt, synthetic construct
  source 1..20: mol_type = other RNA
gccccgtggtcggtcggaac

SEQ ID NO: 9697 - RNA, 20 nt, synthetic construct
  source 1..20: mol_type = other RNA
gcccgtttgtcctctaattc

SEQ ID NO: 9698 - RNA, 20 nt, synthetic construct
  source 1..20: mol_type = other RNA
gccgacgggacgtaaacaaa

SEQ ID NO: 9699 - RNA, 20 nt, synthetic construct
  source 1..20: mol_type = other RNA
gccgcagacacatccagcga

SEQ ID NO: 9700 - RNA, 20 nt, synthetic construct
  source 1..20: mol_type = other RNA
gccgcttgttttgctcgcag

SEQ ID NO: 9701 - RNA, 21 nt, synthetic construct
  source 1..21: mol_type = other RNA
gccgggcaacggggtaaaggt

SEQ ID NO: 9702 - RNA, 20 nt, synthetic construct
  source 1..20: mol_type = other RNA
gccgttccgaccgaccacgg

SEQ ID NO: 9703 - RNA, 20 nt, synthetic construct
  source 1..20: mol_type = other RNA
gccgttgccgggcaacgggg

SEQ ID NO: 9704 - RNA, 21 nt, synthetic construct
  source 1..21: mol_type = other RNA
gccgttgccgggcaacggggt

SEQ ID NO: 9705 - RNA, 21 nt, synthetic construct
  source 1..21: mol_type = other RNA
gcctaaagttcaggcaactct

SEQ ID NO: 9706 - RNA, 21 nt, synthetic construct
  source 1..21: mol_type = other RNA
gcctacaaactgttcacattt

SEQ ID NO: 9707 - RNA, 20 nt, synthetic construct
  source 1..20: mol_type = other RNA
gcctacagcctcctagtaca

SEQ ID NO: 9708 - RNA, 21 nt, synthetic construct
  source 1..21: mol_type = other RNA
gcctcagcccgtttctcctgg

SEQ ID NO: 9709 - RNA, 20 nt, synthetic construct
  source 1..20: mol_type = other RNA
gcctcagctctgtatcggga

SEQ ID NO: 9710 - RNA, 20 nt, synthetic construct
  source 1..20: mol_type = other RNA
gcctccaccaatcgccagac

SEQ ID NO: 9711 - RNA, 20 nt, synthetic construct
  source 1..20: mol_type = other RNA
gcctcgtcgtctaacaacag

SEQ ID NO: 9712 - RNA, 21 nt, synthetic construct
  source 1..21: mol_type = other RNA
gcctctcactctgggatcttg

SEQ ID NO: 9713 - RNA, 20 nt, synthetic construct
  source 1..20: mol_type = other RNA
gcctgaggatgagtgtttct

SEQ ID NO: 9714 - RNA, 21 nt, synthetic construct
  source 1..21: mol_type = other RNA
gcctgaggatgagtgtttctc

SEQ ID NO: 9715 - RNA, 20 nt, synthetic construct
  source 1..20: mol_type = other RNA
gcctgagggctccaccccaa

SEQ ID NO: 9716 - RNA, 20 nt, synthetic construct
  source 1..20: mol_type = other RNA
gcctgctaggttttatccaa

SEQ ID NO: 9717 - RNA, 20 nt, synthetic construct
  source 1..20: mol_type = other RNA
gcctgcttagattgaataca

SEQ ID NO: 9718 - RNA, 20 nt, synthetic construct
  source 1..20: mol_type = other RNA
gcctgtatttccctgctggt

SEQ ID NO: 9719 - RNA, 20 nt, synthetic construct
  source 1..20: mol_type = other RNA
gccttcagagcaaacacagc

SEQ ID NO: 9720 - RNA, 20 nt, synthetic construct
  source 1..20: mol_type = other RNA
gccttctgacttctttcctt

SEQ ID NO: 9721 - RNA, 20 nt, synthetic construct
  source 1..20: mol_type = other RNA
gccttttggggtggagccct

SEQ ID NO: 9722 - RNA, 20 nt, synthetic construct
  source 1..20: mol_type = other RNA
gcgaagtgcacacggtccgg

SEQ ID NO: 9723 - RNA, 20 nt, synthetic construct
  source 1..20: mol_type = other RNA
gcgaatccacactccgaaag

SEQ ID NO: 9724 - RNA, 20 nt, synthetic construct
  source 1..20: mol_type = other RNA
gcgacgtgcagaggtgaagc

SEQ ID NO: 9725 - RNA, 20 nt, synthetic construct
  source 1..20: mol_type = other RNA
gcgagcaaaacaagcggcta

SEQ ID NO: 9726 - RNA, 20 nt, synthetic construct
  source 1..20: mol_type = other RNA
gcgagggagttcttcttcta

SEQ ID NO: 9727 - RNA, 20 nt, synthetic construct
  source 1..20: mol_type = other RNA
gcgataaccaggacaagttg

SEQ ID NO: 9728 - RNA, 20 nt, synthetic construct
  source 1..20: mol_type = other RNA
gcgattgagaccttcgtctg

SEQ ID NO: 9729 - RNA, 20 nt, synthetic construct
  source 1..20: mol_type = other RNA
gcgcagggtccccaatcctc

SEQ ID NO: 9730 - RNA, 20 nt, synthetic construct
  source 1..20: mol_type = other RNA
gcgccgacgggacgtaaaca

SEQ ID NO: 9731 - RNA, 20 nt, synthetic construct
  source 1..20: mol_type = other RNA
gcgcgtgcgtggaacctttt

SEQ ID NO: 9732 - RNA, 20 nt, synthetic construct
  source 1..20: mol_type = other RNA
gcgctgatggcccatgacca

SEQ ID NO: 9733 - RNA, 21 nt, synthetic construct
  source 1..21: mol_type = other RNA
gcgggagaggacaacagagtt

SEQ ID NO: 9734 - RNA, 20 nt, synthetic construct
  source 1..20: mol_type = other RNA
gcggggtttttcttgttgac

SEQ ID NO: 9735 - RNA, 20 nt, synthetic construct
  source 1..20: mol_type = other RNA
gcgggtatattatataagag

SEQ ID NO: 9736 - RNA, 20 nt, synthetic construct
  source 1..20: mol_type = other RNA
gcgtcagcaaacacttggca

SEQ ID NO: 9737 - RNA, 20 nt, synthetic construct
  source 1..20: mol_type = other RNA
gctaggctgtgctgccaact

SEQ ID NO: 9738 - RNA, 20 nt, synthetic construct
  source 1..20: mol_type = other RNA
gctatgcctcatcttcttgt

SEQ ID NO: 9739 - RNA, 21 nt, synthetic construct
  source 1..21: mol_type = other RNA
gctcaggagactctaaggctt

SEQ ID NO: 9740 - RNA, 20 nt, synthetic construct
  source 1..20: mol_type = other RNA
gctccagacctgctgcgagc

SEQ ID NO: 9741 - RNA, 20 nt, synthetic construct
  source 1..20: mol_type = other RNA
gctccagctcctaccttgtt

SEQ ID NO: 9742 - RNA, 20 nt, synthetic construct
  source 1..20: mol_type = other RNA
gctcctaccttgttggcgtc

SEQ ID NO: 9743 - RNA, 20 nt, synthetic construct
  source 1..20: mol_type = other RNA
gctcctctgccgatccatac

SEQ ID NO: 9744 - RNA, 20 nt, synthetic construct
  source 1..20: mol_type = other RNA
gctcctgaactggagccacc

SEQ ID NO: 9745 - RNA, 20 nt, synthetic construct
  source 1..20: mol_type = other RNA
gctcgcagcaggtctggagc

SEQ ID NO: 9746 - RNA, 20 nt, synthetic construct
  source 1..20: mol_type = other RNA
gctctgtatcgggaagcctt

SEQ ID NO: 9747 - RNA, 20 nt, synthetic construct
  source 1..20: mol_type = other RNA
gctgaggcccactcccatag

SEQ ID NO: 9748 - RNA, 20 nt, synthetic construct
  source 1..20: mol_type = other RNA
gctgccaactggatcctgcg

SEQ ID NO: 9749 - RNA, 20 nt, synthetic construct
  source 1..20: mol_type = other RNA
gctgccccatttacacaatg

SEQ ID NO: 9750 - RNA, 20 nt, synthetic construct
  source 1..20: mol_type = other RNA
gctgcgagcaaaacaagcgg

SEQ ID NO: 9751 - RNA, 21 nt, synthetic construct
  source 1..21: mol_type = other RNA
gctgctaggctgtgctgccaa

SEQ ID NO: 9752 - RNA, 20 nt, synthetic construct
  source 1..20: mol_type = other RNA
tccgcagtatggatcggcag

SEQ ID NO: 9753 - RNA, 20 nt, synthetic construct
  source 1..20: mol_type = other RNA
gctggatccaactggtggtc

SEQ ID NO: 9754 - RNA, 20 nt, synthetic construct
  source 1..20: mol_type = other RNA
gctggtggctccagttcagg

SEQ ID NO: 9755 - RNA, 20 nt, synthetic construct
  source 1..20: mol_type = other RNA
gctggtggttgaggatcctg

SEQ ID NO: 9756 - RNA, 20 nt, synthetic construct
  source 1..20: mol_type = other RNA
gctgtaccaaaccttcggac

SEQ ID NO: 9757 - RNA, 20 nt, synthetic construct
  source 1..20: mol_type = other RNA
gctgtagatcttgttcccaa

SEQ ID NO: 9758 - RNA, 20 nt, synthetic construct
  source 1..20: mol_type = other RNA
gctgtaggcataaattggtc

SEQ ID NO: 9759 - RNA, 20 nt, synthetic construct
  source 1..20: mol_type = other RNA
gctgtgccttgggtggcttt

SEQ ID NO: 9760 - RNA, 20 nt, synthetic construct
  source 1..20: mol_type = other RNA
gctgtgtttgctctgaaggc

SEQ ID NO: 9761 - RNA, 20 nt, synthetic construct
  source 1..20: mol_type = other RNA
gcttcccgatacagagctga

SEQ ID NO: 9762 - RNA, 21 nt, synthetic construct
  source 1..21: mol_type = other RNA
gcttgcctgagtgcagtatgg

SEQ ID NO: 9763 - RNA, 20 nt, synthetic construct
  source 1..20: mol_type = other RNA
gcttggaggcttgaacagta

SEQ ID NO: 9764 - RNA, 20 nt, synthetic construct
  source 1..20: mol_type = other RNA
gcttggtcatgggccatcag

SEQ ID NO: 9765 - RNA, 21 nt, synthetic construct
  source 1..21: mol_type = other RNA
gctttcccccactgtttggct

SEQ ID NO: 9766 - RNA, 20 nt, synthetic construct
  source 1..20: mol_type = other RNA
gctttcggaaaattcctatg

SEQ ID NO: 9767 - RNA, 20 nt, synthetic construct
  source 1..20: mol_type = other RNA
ggaaaattcctatgggagtg

SEQ ID NO: 9768 - RNA, 20 nt, synthetic construct
  source 1..20: mol_type = other RNA
ggaaagaagtcagaaggcaa

SEQ ID NO: 9769 - RNA, 21 nt, synthetic construct
  source 1..21: mol_type = other RNA
ggaaagattctgccccatgct

SEQ ID NO: 9770 - RNA, 20 nt, synthetic construct
  source 1..20: mol_type = other RNA
ggaaagccctacgaaccact

SEQ ID NO: 9771 - RNA, 21 nt, synthetic construct
  source 1..21: mol_type = other RNA
ggaaatacaggcctctcactc

SEQ ID NO: 9772 - RNA, 20 nt, synthetic construct
  source 1..20: mol_type = other RNA
ggaacaagatctacagcatg

SEQ ID NO: 9773 - RNA, 20 nt, synthetic construct
  source 1..20: mol_type = other RNA
ggaacagggtttactgctcc

SEQ ID NO: 9774 - RNA, 20 nt, synthetic construct
  source 1..20: mol_type = other RNA
ggaacggcagacggagaagg

SEQ ID NO: 9775 - RNA, 21 nt, synthetic construct
  source 1..21: mol_type = other RNA
ggaactaatgactctagctac

SEQ ID NO: 9776 - RNA, 21 nt, synthetic construct
  source 1..21: mol_type = other RNA
ggaactaccgtgtgtcttggc

SEQ ID NO: 9777 - RNA, 21 nt, synthetic construct
  source 1..21: mol_type = other RNA
ggaagatccagcatctagaga

SEQ ID NO: 9778 - RNA, 20 nt, synthetic construct
  source 1..20: mol_type = other RNA
ggaagatgataaaacgccgc

SEQ ID NO: 9779 - RNA, 20 nt, synthetic construct
  source 1..20: mol_type = other RNA
ggaagccttagagtctcctg

SEQ ID NO: 9780 - RNA, 20 nt, synthetic construct
  source 1..20: mol_type = other RNA
ggaaggcgggtatattatat

SEQ ID NO: 9781 - RNA, 20 nt, synthetic construct
  source 1..20: mol_type = other RNA
ggaagtgttgataggatagg

SEQ ID NO: 9782 - RNA, 20 nt, synthetic construct
  source 1..20: mol_type = other RNA
ggaattagaggacaaacggg

SEQ ID NO: 9783 - RNA, 21 nt, synthetic construct
  source 1..21: mol_type = other RNA
ggacaagttggaggacaggag

SEQ ID NO: 9784 - RNA, 21 nt, synthetic construct
  source 1..21: mol_type = other RNA
ggacacctggccagacgccaa

SEQ ID NO: 9785 - RNA, 20 nt, synthetic construct
  source 1..20: mol_type = other RNA
ggacatgaacaagagatgat

SEQ ID NO: 9786 - RNA, 20 nt, synthetic construct
  source 1..20: mol_type = other RNA
ggaccccttctcgtgttaca

SEQ ID NO: 9787 - RNA, 20 nt, synthetic construct
  source 1..20: mol_type = other RNA
ggaccctgcgctgaacatgg

SEQ ID NO: 9788 - RNA, 20 nt, synthetic construct
  source 1..20: mol_type = other RNA
ggacctgcctcgtcgtctaa

SEQ ID NO: 9789 - RNA, 21 nt, synthetic construct
  source 1..21: mol_type = other RNA
ggacctgcctcgtcgtctaac

SEQ ID NO: 9790 - RNA, 20 nt, synthetic construct
  source 1..20: mol_type = other RNA
tcctctgccgatccatactg

SEQ ID NO: 9791 - RNA, 21 nt, synthetic construct
  source 1..21: mol_type = other RNA
ggagaccaccgtgaacgccca

SEQ ID NO: 9792 - RNA, 20 nt, synthetic construct
  source 1..20: mol_type = other RNA
ggagaggacaacagagttat

SEQ ID NO: 9793 - RNA, 20 nt, synthetic construct
  source 1..20: mol_type = other RNA
ggagaggcagtagtcggaac

SEQ ID NO: 9794 - RNA, 20 nt, synthetic construct
  source 1..20: mol_type = other RNA
ggagcaaacattatcgggac

SEQ ID NO: 9795 - RNA, 20 nt, synthetic construct
  source 1..20: mol_type = other RNA
ggagctggagcattcgggct

SEQ ID NO: 9796 - RNA, 20 nt, synthetic construct
  source 1..20: mol_type = other RNA
ggaggttggtgagtgattgg

SEQ ID NO: 9797 - RNA, 20 nt, synthetic construct
  source 1..20: mol_type = other RNA
ggagtccgcgtaaagagagg

SEQ ID NO: 9798 - RNA, 20 nt, synthetic construct
  source 1..20: mol_type = other RNA
ggagtgcgaatccacactcc

SEQ ID NO: 9799 - RNA, 20 nt, synthetic construct
  source 1..20: mol_type = other RNA
ggagttccgcagtatggatc

SEQ ID NO: 9800 - RNA, 21 nt, synthetic construct
  source 1..21: mol_type = other RNA
ggataaaacctagcaggcata

SEQ ID NO: 9801 - RNA, 20 nt, synthetic construct
  source 1..20: mol_type = other RNA
ggataaccacattgtgtaaa

SEQ ID NO: 9802 - RNA, 20 nt, synthetic construct
  source 1..20: mol_type = other RNA
ggatacatagaggttccttg

SEQ ID NO: 9803 - RNA, 20 nt, synthetic construct
  source 1..20: mol_type = other RNA
ggatacgatgtatatttgcg

SEQ ID NO: 9804 - RNA, 20 nt, synthetic construct
  source 1..20: mol_type = other RNA
ggatccaactggtggtcggg

SEQ ID NO: 9805 - RNA, 21 nt, synthetic construct
  source 1..21: mol_type = other RNA
ggatccaactggtggtcggga

SEQ ID NO: 9806 - RNA, 20 nt, synthetic construct
  source 1..20: mol_type = other RNA
ggatcctcaaccaccagcac

SEQ ID NO: 9807 - RNA, 20 nt, synthetic construct
  source 1..20: mol_type = other RNA
ggatcctggaattagaggac

SEQ ID NO: 9808 - RNA, 20 nt, synthetic construct
  source 1..20: mol_type = other RNA
ggatcggcagaggagccgaa

SEQ ID NO: 9809 - RNA, 20 nt, synthetic construct
  source 1..20: mol_type = other RNA
ggatcttgcagagtttggtg

SEQ ID NO: 9810 - RNA, 20 nt, synthetic construct
  source 1..20: mol_type = other RNA
ggatgaagaggaagatgata

SEQ ID NO: 9811 - RNA, 20 nt, synthetic construct
  source 1..20: mol_type = other RNA
ggatgagtgtttctcaaagg

SEQ ID NO: 9812 - RNA, 20 nt, synthetic construct
  source 1..20: mol_type = other RNA
ggatgatgggatgggaatac

SEQ ID NO: 9813 - RNA, 20 nt, synthetic construct
  source 1..20: mol_type = other RNA
ggattaaagacaggtacagt

SEQ ID NO: 9814 - RNA, 21 nt, synthetic construct
  source 1..21: mol_type = other RNA
ggattctttcccgaccaccag

SEQ ID NO: 9815 - RNA, 20 nt, synthetic construct
  source 1..20: mol_type = other RNA
ggatttgctggcaaagtttg

SEQ ID NO: 9816 - RNA, 20 nt, synthetic construct
  source 1..20: mol_type = other RNA
ggatttgctgtgtttgctct

SEQ ID NO: 9817 - RNA, 20 nt, synthetic construct
  source 1..20: mol_type = other RNA
ggcaacataccttgatagtc

SEQ ID NO: 9818 - RNA, 20 nt, synthetic construct
  source 1..20: mol_type = other RNA
ggcaacggccaggtctgtgc

SEQ ID NO: 9819 - RNA, 20 nt, synthetic construct
  source 1..20: mol_type = other RNA
ggcaagcaattctttgctgg

SEQ ID NO: 9820 - RNA, 20 nt, synthetic construct
  source 1..20: mol_type = other RNA
ggcacagacctggccgttgc

SEQ ID NO: 9821 - RNA, 20 nt, synthetic construct
  source 1..20: mol_type = other RNA
ggcactagtaaactgagcca

SEQ ID NO: 9822 - RNA, 20 nt, synthetic construct
  source 1..20: mol_type = other RNA
ggcagacggagaaggggacg

SEQ ID NO: 9823 - RNA, 21 nt, synthetic construct
  source 1..21: mol_type = other RNA
ggcagacggagaaggggacga

SEQ ID NO: 9824 - RNA, 20 nt, synthetic construct
  source 1..20: mol_type = other RNA
ggcagatgagaaggcacaga

SEQ ID NO: 9825 - RNA, 21 nt, synthetic construct
  source 1..21: mol_type = other RNA
ggcagcaaaacccaaaagacc

SEQ ID NO: 9826 - RNA, 21 nt, synthetic construct
  source 1..21: mol_type = other RNA
ggcaggaggcggatttgctgg

SEQ ID NO: 9827 - RNA, 20 nt, synthetic construct
  source 1..20: mol_type = other RNA
ggcatactacaaactttgcc

SEQ ID NO: 9828 - RNA, 21 nt, synthetic construct
  source 1..21: mol_type = other RNA
ggcatactacaaactttgcca

SEQ ID NO: 9829 - RNA, 20 nt, synthetic construct
  source 1..20: mol_type = other RNA
ggcatagcagcaggatgaag

SEQ ID NO: 9830 - RNA, 20 nt, synthetic construct
  source 1..20: mol_type = other RNA
ggcatggacatcgaccctta

SEQ ID NO: 9831 - RNA, 20 nt, synthetic construct
  source 1..20: mol_type = other RNA
ggccagacgccaacaaggta

SEQ ID NO: 9832 - RNA, 20 nt, synthetic construct
  source 1..20: mol_type = other RNA
ggcccacttacagttaatga

SEQ ID NO: 9833 - RNA, 20 nt, synthetic construct
  source 1..20: mol_type = other RNA
ggcccatattagtgttgaca

SEQ ID NO: 9834 - RNA, 20 nt, synthetic construct
  source 1..20: mol_type = other RNA
ggcctcagcccgtttctcct

SEQ ID NO: 9835 - RNA, 20 nt, synthetic construct
  source 1..20: mol_type = other RNA
ggcctccgtgcggtggggtg

SEQ ID NO: 9836 - RNA, 20 nt, synthetic construct
  source 1..20: mol_type = other RNA
ggcctctcactctgggatct

SEQ ID NO: 9837 - RNA, 20 nt, synthetic construct
  source 1..20: mol_type = other RNA
ggcctgtatttccctgctgg

SEQ ID NO: 9838 - RNA, 20 nt, synthetic construct
  source 1..20: mol_type = other RNA
ggccttgtaagttggcgaga

SEQ ID NO: 9839 - RNA, 21 nt, synthetic construct
  source 1..21: mol_type = other RNA
ggcgagaaagtgaaagcctgc

SEQ ID NO: 9840 - RNA, 20 nt, synthetic construct
  source 1..20: mol_type = other RNA
ggcgagggagttcttcttct

SEQ ID NO: 9841 - RNA, 20 nt, synthetic construct
  source 1..20: mol_type = other RNA
ggcgattggtggaggcagga

SEQ ID NO: 9842 - RNA, 21 nt, synthetic construct
  source 1..21: mol_type = other RNA
ggcgattggtggaggcaggag

SEQ ID NO: 9843 - RNA, 21 nt, synthetic construct
  source 1..21: mol_type = other RNA
ggcggatttgctggcaaagtt

SEQ ID NO: 9844 - RNA, 20 nt, synthetic construct
  source 1..20: mol_type = other RNA
ggcggggtttttcttgttga

SEQ ID NO: 9845 - RNA, 21 nt, synthetic construct
  source 1..21: mol_type = other RNA
ggcggggtttttcttgttgac

SEQ ID NO: 9846 - RNA, 20 nt, synthetic construct
  source 1..20: mol_type = other RNA
ggcgggtatattatataaga

SEQ ID NO: 9847 - RNA, 20 nt, synthetic construct
  source 1..20: mol_type = other RNA
ggcgttcacggtggtctcca

SEQ ID NO: 9848 - RNA, 20 nt, synthetic construct
  source 1..20: mol_type = other RNA
ggctaggagttccgcagtat

SEQ ID NO: 9849 - RNA, 20 nt, synthetic construct
  source 1..20: mol_type = other RNA
ggctccagttcaggagcagt

SEQ ID NO: 9850 - RNA, 20 nt, synthetic construct
  source 1..20: mol_type = other RNA
ggctgaggcccactcccata

SEQ ID NO: 9851 - RNA, 20 nt, synthetic construct
  source 1..20: mol_type = other RNA
ggctggatccaactggtggt

SEQ ID NO: 9852 - RNA, 20 nt, synthetic construct
  source 1..20: mol_type = other RNA
ggcttcccgatacagagctg

SEQ ID NO: 9853 - RNA, 21 nt, synthetic construct
  source 1..21: mol_type = other RNA
ggcttcccgatacagagctga

SEQ ID NO: 9854 - RNA, 21 nt, synthetic construct
  source 1..21: mol_type = other RNA
ggctttcagttatatggatga

SEQ ID NO: 9855 - RNA, 20 nt, synthetic construct
  source 1..20: mol_type = other RNA
ggctttcggaaaattcctat

SEQ ID NO: 9856 - RNA, 20 nt, synthetic construct
  source 1..20: mol_type = other RNA
gggaaagaatcccagaggat

SEQ ID NO: 9857 - RNA, 21 nt, synthetic construct
  source 1..21: mol_type = other RNA
gggaaagaatcccagaggatt

SEQ ID NO: 9858 - RNA, 20 nt, synthetic construct
  source 1..20: mol_type = other RNA
gggaaagccctacgaaccac

SEQ ID NO: 9859 - RNA, 20 nt, synthetic construct
  source 1..20: mol_type = other RNA
gggaacaagatctacagcat

SEQ ID NO: 9860 - RNA, 20 nt, synthetic construct
  source 1..20: mol_type = other RNA
gggaagccttagagtctcct

SEQ ID NO: 9861 - RNA, 20 nt, synthetic construct
  source 1..20: mol_type = other RNA
gggaccatgccgaacctgca

SEQ ID NO: 9862 - RNA, 20 nt, synthetic construct
  source 1..20: mol_type = other RNA
gggaccctgcgctgaacatg

SEQ ID NO: 9863 - RNA, 20 nt, synthetic construct
  source 1..20: mol_type = other RNA
gggactgcgaattttggcca

SEQ ID NO: 9864 - RNA, 20 nt, synthetic construct
  source 1..20: mol_type = other RNA
gggagaggcagtagtcggaa

SEQ ID NO: 9865 - RNA, 21 nt, synthetic construct
  source 1..21: mol_type = other RNA
gggaggagttgggggaggaga

SEQ ID NO: 9866 - RNA, 20 nt, synthetic construct
  source 1..20: mol_type = other RNA
gggatacatagaggttcctt

SEQ ID NO: 9867 - RNA, 21 nt, synthetic construct
  source 1..21: mol_type = other RNA
gggatacatagaggttccttg

SEQ ID NO: 9868 - RNA, 20 nt, synthetic construct
  source 1..20: mol_type = other RNA
gggatcttgcagagtttggt

SEQ ID NO: 9869 - RNA, 21 nt, synthetic construct
  source 1..21: mol_type = other RNA
gggatcttgcagagtttggtg

SEQ ID NO: 9870 - RNA, 21 nt, synthetic construct
  source 1..21: mol_type = other RNA
gggcaacattcggtgggcgtt

SEQ ID NO: 9871 - RNA, 20 nt, synthetic construct
  source 1..20: mol_type = other RNA
gggcaacggggtaaaggttc

SEQ ID NO: 9872 - RNA, 20 nt, synthetic construct
  source 1..20: mol_type = other RNA
gggcagaatctttccaccag

SEQ ID NO: 9873 - RNA, 20 nt, synthetic construct
  source 1..20: mol_type = other RNA
gggcatactacaaactttgc

SEQ ID NO: 9874 - RNA, 21 nt, synthetic construct
  source 1..21: mol_type = other RNA
gggccaagtctgtacagcatc

SEQ ID NO: 9875 - RNA, 20 nt, synthetic construct
  source 1..20: mol_type = other RNA
gggccatcagcgcgtgcgtg

SEQ ID NO: 9876 - RNA, 20 nt, synthetic construct
  source 1..20: mol_type = other RNA
gggcctcagcccgtttctcc

SEQ ID NO: 9877 - RNA, 20 nt, synthetic construct
  source 1..20: mol_type = other RNA
gggcgcacctctctttacgc

SEQ ID NO: 9878 - RNA, 20 nt, synthetic construct
  source 1..20: mol_type = other RNA
gggctgaggcccactcccat

SEQ ID NO: 9879 - RNA, 20 nt, synthetic construct
  source 1..20: mol_type = other RNA
gggcttggtcatgggccatc

SEQ ID NO: 9880 - RNA, 20 nt, synthetic construct
  source 1..20: mol_type = other RNA
gggctttcggaaaattccta

SEQ ID NO: 9881 - RNA, 21 nt, synthetic construct
  source 1..21: mol_type = other RNA
gggctttcggaaaattcctat

SEQ ID NO: 9882 - RNA, 20 nt, synthetic construct
  source 1..20: mol_type = other RNA
ggggaactaccgtgtgtctt

SEQ ID NO: 9883 - RNA, 20 nt, synthetic construct
  source 1..20: mol_type = other RNA
ggggaccctgcgctgaacat

SEQ ID NO: 9884 - RNA, 20 nt, synthetic construct
  source 1..20: mol_type = other RNA
ggggacgagagagtcccaag

SEQ ID NO: 9885 - RNA, 20 nt, synthetic construct
  source 1..20: mol_type = other RNA
ggggactgcgaattttggcc

SEQ ID NO: 9886 - RNA, 20 nt, synthetic construct
  source 1..20: mol_type = other RNA
ggggcatttggtggtctata

SEQ ID NO: 9887 - RNA, 20 nt, synthetic construct
  source 1..20: mol_type = other RNA
ggggcgcacctctctttacg

SEQ ID NO: 9888 - RNA, 20 nt, synthetic construct
  source 1..20: mol_type = other RNA
ggggcttggtcatgggccat

SEQ ID NO: 9889 - RNA, 20 nt, synthetic construct
  source 1..20: mol_type = other RNA
gggggaactaccgtgtgtct

SEQ ID NO: 9890 - RNA, 20 nt, synthetic construct
  source 1..20: mol_type = other RNA
gggggaggagattagattaa

SEQ ID NO: 9891 - RNA, 20 nt, synthetic construct
  source 1..20: mol_type = other RNA
ggggtgaaacccagcccgaa

SEQ ID NO: 9892 - RNA, 20 nt, synthetic construct
  source 1..20: mol_type = other RNA
ggggtggagccctcaggctc

SEQ ID NO: 9893 - RNA, 20 nt, synthetic construct
  source 1..20: mol_type = other RNA
ggggtttttcttgttgacaa

SEQ ID NO: 9894 - RNA, 20 nt, synthetic construct
  source 1..20: mol_type = other RNA
gggtaggctgccttcctgtc

SEQ ID NO: 9895 - RNA, 21 nt, synthetic construct
  source 1..21: mol_type = other RNA
gggtaggctgccttcctgtct

SEQ ID NO: 9896 - RNA, 20 nt, synthetic construct
  source 1..20: mol_type = other RNA
gggtatattatataagagag

SEQ ID NO: 9897 - RNA, 20 nt, synthetic construct
  source 1..20: mol_type = other RNA
gggtattaaaccttattatc

SEQ ID NO: 9898 - RNA, 21 nt, synthetic construct
  source 1..21: mol_type = other RNA
gggtcaccatattcttgggaa

SEQ ID NO: 9899 - RNA, 20 nt, synthetic construct
  source 1..20: mol_type = other RNA
gggtcctaggaatcctgatg

SEQ ID NO: 9900 - RNA, 20 nt, synthetic construct
  source 1..20: mol_type = other RNA
gggtcgatgtccatgcccca

SEQ ID NO: 9901 - RNA, 20 nt, synthetic construct
  source 1..20: mol_type = other RNA
gggtcgtccgcaggattcag

SEQ ID NO: 9902 - RNA, 20 nt, synthetic construct
  source 1..20: mol_type = other RNA
gggtggagccctcaggctca

SEQ ID NO: 9903 - RNA, 20 nt, synthetic construct
  source 1..20: mol_type = other RNA
gggtgttaatttggaagatc

SEQ ID NO: 9904 - RNA, 20 nt, synthetic construct
  source 1..20: mol_type = other RNA
gggttactctctgaatttta

SEQ ID NO: 9905 - RNA, 20 nt, synthetic construct
  source 1..20: mol_type = other RNA
gggttgcgtcagcaaacact

SEQ ID NO: 9906 - RNA, 20 nt, synthetic construct
  source 1..20: mol_type = other RNA
gggtttaaatgtatacccaa

SEQ ID NO: 9907 - RNA, 20 nt, synthetic construct
  source 1..20: mol_type = other RNA
gggtttactgctcctgaact

SEQ ID NO: 9908 - RNA, 20 nt, synthetic construct
  source 1..20: mol_type = other RNA
gggtttcaccccaccgcacg

SEQ ID NO: 9909 - RNA, 20 nt, synthetic construct
  source 1..20: mol_type = other RNA
ggtaaatatttggtaacctt

SEQ ID NO: 9910 - RNA, 20 nt, synthetic construct
  source 1..20: mol_type = other RNA
ggtaacctttggataaaacc

SEQ ID NO: 9911 - RNA, 20 nt, synthetic construct
  source 1..20: mol_type = other RNA
ggtaggagctggagcattcg

SEQ ID NO: 9912 - RNA, 20 nt, synthetic construct
  source 1..20: mol_type = other RNA
ggtaggctgccttcctgtct

SEQ ID NO: 9913 - RNA, 20 nt, synthetic construct
  source 1..20: mol_type = other RNA
ggtagttccccctagaaaat

SEQ ID NO: 9914 - RNA, 20 nt, synthetic construct
  source 1..20: mol_type = other RNA
ggtatacatttaaaccctaa

SEQ ID NO: 9915 - RNA, 20 nt, synthetic construct
  source 1..20: mol_type = other RNA
ggtattaaaccttattatcc

SEQ ID NO: 9916 - RNA, 20 nt, synthetic construct
  source 1..20: mol_type = other RNA
ggtattgtgaggattcttgt

SEQ ID NO: 9917 - RNA, 20 nt, synthetic construct
  source 1..20: mol_type = other RNA
ggtcaccatattcttgggaa

SEQ ID NO: 9918 - RNA, 20 nt, synthetic construct
  source 1..20: mol_type = other RNA
ggtcatgggccatcagcgcg

SEQ ID NO: 9919 - RNA, 20 nt, synthetic construct
  source 1..20: mol_type = other RNA
ggtcccgtgctggtggttga

SEQ ID NO: 9920 - RNA, 20 nt, synthetic construct
  source 1..20: mol_type = other RNA
ggtcgatgtccatgccccaa

SEQ ID NO: 9921 - RNA, 20 nt, synthetic construct
  source 1..20: mol_type = other RNA
ggtcggaacggcagacggag

SEQ ID NO: 9922 - RNA, 20 nt, synthetic construct
  source 1..20: mol_type = other RNA
ggtcgggaaagaatcccaga

SEQ ID NO: 9923 - RNA, 20 nt, synthetic construct
  source 1..20: mol_type = other RNA
ggtcggtcggaacggcagac

SEQ ID NO: 9924 - RNA, 20 nt, synthetic construct
  source 1..20: mol_type = other RNA
ggtcggtcgttgacattgca

SEQ ID NO: 9925 - RNA, 20 nt, synthetic construct
  source 1..20: mol_type = other RNA
ggtctcaatcgccgcgtcgc

SEQ ID NO: 9926 - RNA, 21 nt, synthetic construct
  source 1..21: mol_type = other RNA
ggtctcaatcgccgcgtcgca

SEQ ID NO: 9927 - RNA, 20 nt, synthetic construct
  source 1..20: mol_type = other RNA
ggtctccatgcgacgtgcag

SEQ ID NO: 9928 - RNA, 21 nt, synthetic construct
  source 1..21: mol_type = other RNA
ggtctctagatgctggatctt

SEQ ID NO: 9929 - RNA, 20 nt, synthetic construct
  source 1..20: mol_type = other RNA
ggtctggagcaaacattatc

SEQ ID NO: 9930 - RNA, 20 nt, synthetic construct
  source 1..20: mol_type = other RNA
ggtctgtgccaagtgtttgc

SEQ ID NO: 9931 - RNA, 20 nt, synthetic construct
  source 1..20: mol_type = other RNA
ggtgaggtgaacaatgctca

SEQ ID NO: 9932 - RNA, 20 nt, synthetic construct
  source 1..20: mol_type = other RNA
ggtgagtgattggaggttgg

SEQ ID NO: 9933 - RNA, 21 nt, synthetic construct
  source 1..21: mol_type = other RNA
ggtgcaatttccgtccgaagg

SEQ ID NO: 9934 - RNA, 20 nt, synthetic construct
  source 1..20: mol_type = other RNA
ggtgcgccccgtggtcggtc

SEQ ID NO: 9935 - RNA, 20 nt, synthetic construct
  source 1..20: mol_type = other RNA
ggtggaaagattctgcccca

SEQ ID NO: 9936 - RNA, 20 nt, synthetic construct
  source 1..20: mol_type = other RNA
ggtggagccctcaggctcag

SEQ ID NO: 9937 - RNA, 20 nt, synthetic construct
  source 1..20: mol_type = other RNA
ggtggggtgaaacccagccc

SEQ ID NO: 9938 - RNA, 20 nt, synthetic construct
  source 1..20: mol_type = other RNA
ggtggtcgggaaagaatccc

SEQ ID NO: 9939 - RNA, 21 nt, synthetic construct
  source 1..21: mol_type = other RNA
ggtggtcgggaaagaatccca

SEQ ID NO: 9940 - RNA, 20 nt, synthetic construct
  source 1..20: mol_type = other RNA
ggtggtctccatgcgacgtg

SEQ ID NO: 9941 - RNA, 21 nt, synthetic construct
  source 1..21: mol_type = other RNA
ggtggtctccatgcgacgtgc

SEQ ID NO: 9942 - RNA, 20 nt, synthetic construct
  source 1..20: mol_type = other RNA
ggtgtaaatgtatattagga

SEQ ID NO: 9943 - RNA, 20 nt, synthetic construct
  source 1..20: mol_type = other RNA
ggtgttaatttggaagatcc

SEQ ID NO: 9944 - RNA, 20 nt, synthetic construct
  source 1..20: mol_type = other RNA
ggtgttttccaatgaggatt

SEQ ID NO: 9945 - RNA, 20 nt, synthetic construct
  source 1..20: mol_type = other RNA
ggttaccaaatatttaccat

SEQ ID NO: 9946 - RNA, 20 nt, synthetic construct
  source 1..20: mol_type = other RNA
ggttactctctgaattttat

SEQ ID NO: 9947 - RNA, 20 nt, synthetic construct
  source 1..20: mol_type = other RNA
ggttatgtcattggaagtta

SEQ ID NO: 9948 - RNA, 20 nt, synthetic construct
  source 1..20: mol_type = other RNA
ggttcaggtattgtttacac

SEQ ID NO: 9949 - RNA, 20 nt, synthetic construct
  source 1..20: mol_type = other RNA
ggttccacgcacgcgctgat

SEQ ID NO: 9950 - RNA, 20 nt, synthetic construct
  source 1..20: mol_type = other RNA
ggttccttgagcagtagtca

SEQ ID NO: 9951 - RNA, 21 nt, synthetic construct
  source 1..21: mol_type = other RNA
ggttccttgagcagtagtcat

SEQ ID NO: 9952 - RNA, 20 nt, synthetic construct
  source 1..20: mol_type = other RNA
ggttcggcatggtcccgtgc

SEQ ID NO: 9953 - RNA, 21 nt, synthetic construct
  source 1..21: mol_type = other RNA
ggttcggcatggtcccgtgct

SEQ ID NO: 9954 - RNA, 20 nt, synthetic construct
  source 1..20: mol_type = other RNA
ggttgaggatcctggaatta

SEQ ID NO: 9955 - RNA, 20 nt, synthetic construct
  source 1..20: mol_type = other RNA
ggttgcgtcagcaaacactt

SEQ ID NO: 9956 - RNA, 20 nt, synthetic construct
  source 1..20: mol_type = other RNA
ggttggggactgcgaatttt

SEQ ID NO: 9957 - RNA, 20 nt, synthetic construct
  source 1..20: mol_type = other RNA
ggtttaatacccttatccaa

SEQ ID NO: 9958 - RNA, 20 nt, synthetic construct
  source 1..20: mol_type = other RNA
ggtttactgctcctgaactg

SEQ ID NO: 9959 - RNA, 20 nt, synthetic construct
  source 1..20: mol_type = other RNA
ggtttcaccccaccgcacgg

SEQ ID NO: 9960 - RNA, 20 nt, synthetic construct
  source 1..20: mol_type = other RNA
ggtttggtacagcaacagga

SEQ ID NO: 9961 - RNA, 20 nt, synthetic construct
  source 1..20: mol_type = other RNA
ggttttatccaaaggttacc

SEQ ID NO: 9962 - RNA, 20 nt, synthetic construct
  source 1..20: mol_type = other RNA
gtaaacaaaggacgtcccgc

SEQ ID NO: 9963 - RNA, 21 nt, synthetic construct
  source 1..21: mol_type = other RNA
gtaaacaaaggacgtcccgcg

SEQ ID NO: 9964 - RNA, 20 nt, synthetic construct
  source 1..20: mol_type = other RNA
gtaaaccctgttccgactac

SEQ ID NO: 9965 - RNA, 20 nt, synthetic construct
  source 1..20: mol_type = other RNA
gtaaactgagccaggagaaa

SEQ ID NO: 9966 - RNA, 20 nt, synthetic construct
  source 1..20: mol_type = other RNA
gtaaagagaggtgcgccccg

SEQ ID NO: 9967 - RNA, 20 nt, synthetic construct
  source 1..20: mol_type = other RNA
gtaaatagtgtctagtttgg

SEQ ID NO: 9968 - RNA, 21 nt, synthetic construct
  source 1..21: mol_type = other RNA
gtaaatagtgtctagtttgga

SEQ ID NO: 9969 - RNA, 20 nt, synthetic construct
  source 1..20: mol_type = other RNA
gtaaatatttggtaaccttt

SEQ ID NO: 9970 - RNA, 20 nt, synthetic construct
  source 1..20: mol_type = other RNA
gtaaatggggcagcaaaacc

SEQ ID NO: 9971 - RNA, 20 nt, synthetic construct
  source 1..20: mol_type = other RNA
gtaacacgagaaggggtcct

SEQ ID NO: 9972 - RNA, 20 nt, synthetic construct
  source 1..20: mol_type = other RNA
gtaacctttggataaaacct

SEQ ID NO: 9973 - RNA, 20 nt, synthetic construct
  source 1..20: mol_type = other RNA
gtaagaccttgggcaacatt

SEQ ID NO: 9974 - RNA, 20 nt, synthetic construct
  source 1..20: mol_type = other RNA
gtaagttggcgagaaagtga

SEQ ID NO: 9975 - RNA, 20 nt, synthetic construct
  source 1..20: mol_type = other RNA
gtacgagatcttctagatac

SEQ ID NO: 9976 - RNA, 20 nt, synthetic construct
  source 1..20: mol_type = other RNA
gtactaggaggctgtaggca

SEQ ID NO: 9977 - RNA, 20 nt, synthetic construct
  source 1..20: mol_type = other RNA
gtactgaaggaaagaagtca

SEQ ID NO: 9978 - RNA, 20 nt, synthetic construct
  source 1..20: mol_type = other RNA
gtagaagaataaagaccagt

SEQ ID NO: 9979 - RNA, 20 nt, synthetic construct
  source 1..20: mol_type = other RNA
gtagctccaaattctttata

SEQ ID NO: 9980 - RNA, 21 nt, synthetic construct
  source 1..21: mol_type = other RNA
gtaggagctggagcattcggg

SEQ ID NO: 9981 - RNA, 20 nt, synthetic construct
  source 1..20: mol_type = other RNA
gtaggcataaattggtctgc

SEQ ID NO: 9982 - RNA, 20 nt, synthetic construct
  source 1..20: mol_type = other RNA
gtaggcccacttacagttaa

SEQ ID NO: 9983 - RNA, 20 nt, synthetic construct
  source 1..20: mol_type = other RNA
gtagtatgccctgagcctga

SEQ ID NO: 9984 - RNA, 20 nt, synthetic construct
  source 1..20: mol_type = other RNA
gtagtcagttatgtcaacac

SEQ ID NO: 9985 - RNA, 20 nt, synthetic construct
  source 1..20: mol_type = other RNA
gtagtcatgcaggttcggca

SEQ ID NO: 9986 - RNA, 20 nt, synthetic construct
  source 1..20: mol_type = other RNA
gtagtcggaacagggtttac

SEQ ID NO: 9987 - RNA, 20 nt, synthetic construct
  source 1..20: mol_type = other RNA
gtagttccccctagaaaatt

SEQ ID NO: 9988 - RNA, 20 nt, synthetic construct
  source 1..20: mol_type = other RNA
gtagtttccggaagtgttga

SEQ ID NO: 9989 - RNA, 20 nt, synthetic construct
  source 1..20: mol_type = other RNA
gtatacatttaaaccctaac

SEQ ID NO: 9990 - RNA, 20 nt, synthetic construct
  source 1..20: mol_type = other RNA
gtatacccaaagacaaaaga

SEQ ID NO: 9991 - RNA, 20 nt, synthetic construct
  source 1..20: mol_type = other RNA
gtatctagaagatctcgtac

SEQ ID NO: 9992 - RNA, 20 nt, synthetic construct
  source 1..20: mol_type = other RNA
gtatgatgtgttcttgtggc

SEQ ID NO: 9993 - RNA, 20 nt, synthetic construct
  source 1..20: mol_type = other RNA
gtatgcatgtattcaatcta

SEQ ID NO: 9994 - RNA, 20 nt, synthetic construct
  source 1..20: mol_type = other RNA
gtatggatcggcagaggagc

SEQ ID NO: 9995 - RNA, 20 nt, synthetic construct
  source 1..20: mol_type = other RNA
gtattaaaccttattatcca

SEQ ID NO: 9996 - RNA, 20 nt, synthetic construct
  source 1..20: mol_type = other RNA
gtattcccatcccatcatcc

SEQ ID NO: 9997 - RNA, 21 nt, synthetic construct
  source 1..21: mol_type = other RNA
gtatttggtgtctttcggagt

SEQ ID NO: 9998 - RNA, 20 nt, synthetic construct
  source 1..20: mol_type = other RNA
gtcaacactaatatgggcct

SEQ ID NO: 9999 - RNA, 20 nt, synthetic construct
  source 1..20: mol_type = other RNA
gtcaatcttctcgaggattg

SEQ ID NO: 10000 - RNA, 20 nt, synthetic construct
  source 1..20: mol_type = other RNA
gtcaccatattcttgggaac

SEQ ID NO: 10001 - RNA, 20 nt, synthetic construct
  source 1..20: mol_type = other RNA
gtcattagttccccccagca

SEQ ID NO: 10002 - RNA, 20 nt, synthetic construct
  source 1..20: mol_type = other RNA
gtccaagagtcctcttatgt

SEQ ID NO: 10003 - RNA, 20 nt, synthetic construct
  source 1..20: mol_type = other RNA
gtccaaggaatactaacatt

SEQ ID NO: 10004 - RNA, 20 nt, synthetic construct
  source 1..20: mol_type = other RNA
tggacttctctcaattttct

SEQ ID NO: 10005 - RNA, 20 nt, synthetic construct
  source 1..20: mol_type = other RNA
gtccagaagaaccaacaaga

SEQ ID NO: 10006 - RNA, 20 nt, synthetic construct
  source 1..20: mol_type = other RNA
gtccatgccccaaagccacc

SEQ ID NO: 10007 - RNA, 20 nt, synthetic construct
  source 1..20: mol_type = other RNA
gtcccaagcgaccccgagaa

SEQ ID NO: 10008 - RNA, 20 nt, synthetic construct
  source 1..20: mol_type = other RNA
gtcccgataatgtttgctcc

SEQ ID NO: 10009 - RNA, 20 nt, synthetic construct
  source 1..20: mol_type = other RNA
gtcccgcgcaggatccagtt

SEQ ID NO: 10010 - RNA, 20 nt, synthetic construct
  source 1..20: mol_type = other RNA
gtcccgtcggcgctgaatcc

SEQ ID NO: 10011 - RNA, 20 nt, synthetic construct
  source 1..20: mol_type = other RNA
gtccggcagatgagaaggca

SEQ ID NO: 10012 - RNA, 20 nt, synthetic construct
  source 1..20: mol_type = other RNA
gtcctactgttcaagcctcc

SEQ ID NO: 10013 - RNA, 20 nt, synthetic construct
  source 1..20: mol_type = other RNA
gtcctcttatgtaagacctt

SEQ ID NO: 10014 - RNA, 20 nt, synthetic construct
  source 1..20: mol_type = other RNA
gtcctttgtttacgtcccgt

SEQ ID NO: 10015 - RNA, 20 nt, synthetic construct
  source 1..20: mol_type = other RNA
gtcgcagaagatctcaatct

SEQ ID NO: 10016 - RNA, 20 nt, synthetic construct
  source 1..20: mol_type = other RNA
gtcggaacggcagacggaga

SEQ ID NO: 10017 - RNA, 20 nt, synthetic construct
  source 1..20: mol_type = other RNA
gtcggtcggaacggcagacg

SEQ ID NO: 10018 - RNA, 20 nt, synthetic construct
  source 1..20: mol_type = other RNA
gtcggtcgttgacattgcag

SEQ ID NO: 10019 - RNA, 20 nt, synthetic construct
  source 1..20: mol_type = other RNA
gtctaacaacagtagtttcc

SEQ ID NO: 10020 - RNA, 20 nt, synthetic construct
  source 1..20: mol_type = other RNA
gtctagactctgcggtattg

SEQ ID NO: 10021 - RNA, 21 nt, synthetic construct
  source 1..21: mol_type = other RNA
gtctagactctgcggtattgt

SEQ ID NO: 10022 - RNA, 20 nt, synthetic construct
  source 1..20: mol_type = other RNA
gtctataagctggaggagtg

SEQ ID NO: 10023 - RNA, 20 nt, synthetic construct
  source 1..20: mol_type = other RNA
gtctcaatcgccgcgtcgca

SEQ ID NO: 10024 - RNA, 20 nt, synthetic construct
  source 1..20: mol_type = other RNA
gtctgcgcaccagcaccatg

SEQ ID NO: 10025 - RNA, 20 nt, synthetic construct
  source 1..20: mol_type = other RNA
gtctggagcaaacattatcg

SEQ ID NO: 10026 - RNA, 20 nt, synthetic construct
  source 1..20: mol_type = other RNA
gtctggccaggtgtccttgt

SEQ ID NO: 10027 - RNA, 20 nt, synthetic construct
  source 1..20: mol_type = other RNA
gtctggcgattggtggaggc

SEQ ID NO: 10028 - RNA, 20 nt, synthetic construct
  source 1..20: mol_type = other RNA
gtctgtgccttctcatctgc

SEQ ID NO: 10029 - RNA, 20 nt, synthetic construct
  source 1..20: mol_type = other RNA
gtcttacataagaggactct

SEQ ID NO: 10030 - RNA, 20 nt, synthetic construct
  source 1..20: mol_type = other RNA
gtcttggtgtaaatgtatat

SEQ ID NO: 10031 - RNA, 20 nt, synthetic construct
  source 1..20: mol_type = other RNA
gtctttaaacaaacagtctt

SEQ ID NO: 10032 - RNA, 21 nt, synthetic construct
  source 1..21: mol_type = other RNA
gtctttgaagtatgcctcaag

SEQ ID NO: 10033 - RNA, 20 nt, synthetic construct
  source 1..20: mol_type = other RNA
gtctttgtactaggaggctg

SEQ ID NO: 10034 - RNA, 20 nt, synthetic construct
  source 1..20: mol_type = other RNA
gtgaaaaagttgcatggtgc

SEQ ID NO: 10035 - RNA, 20 nt, synthetic construct
  source 1..20: mol_type = other RNA
gtgaaaccacaagagttgcc

SEQ ID NO: 10036 - RNA, 20 nt, synthetic construct
  source 1..20: mol_type = other RNA
gtgagaggcctgtatttccc

SEQ ID NO: 10037 - RNA, 21 nt, synthetic construct
  source 1..21: mol_type = other RNA
gtgagaggcctgtatttccct

SEQ ID NO: 10038 - RNA, 20 nt, synthetic construct
  source 1..20: mol_type = other RNA
gtgaggattcttgtcaacaa

SEQ ID NO: 10039 - RNA, 20 nt, synthetic construct
  source 1..20: mol_type = other RNA
gtgaggtgaacaatgctcag

SEQ ID NO: 10040 - RNA, 20 nt, synthetic construct
  source 1..20: mol_type = other RNA
gtgatgttctccatgttcag

SEQ ID NO: 10041 - RNA, 20 nt, synthetic construct
  source 1..20: mol_type = other RNA
gtgcacacggtccggcagat

SEQ ID NO: 10042 - RNA, 20 nt, synthetic construct
  source 1..20: mol_type = other RNA
gtgcagtatggtgaggtgaa

SEQ ID NO: 10043 - RNA, 20 nt, synthetic construct
  source 1..20: mol_type = other RNA
gtgccaagtgtttgctgacg

SEQ ID NO: 10044 - RNA, 20 nt, synthetic construct
  source 1..20: mol_type = other RNA
gtgcgaatccacactccgaa

SEQ ID NO: 10045 - RNA, 20 nt, synthetic construct
  source 1..20: mol_type = other RNA
gtgcgccccgtggtcggtcg

SEQ ID NO: 10046 - RNA, 20 nt, synthetic construct
  source 1..20: mol_type = other RNA
gtgctgccaactggatcctg

SEQ ID NO: 10047 - RNA, 20 nt, synthetic construct
  source 1..20: mol_type = other RNA
gtgctggtggttgaggatcc

SEQ ID NO: 10048 - RNA, 20 nt, synthetic construct
  source 1..20: mol_type = other RNA
gtggacttctctcaattttc

SEQ ID NO: 10049 - RNA, 20 nt, synthetic construct
  source 1..20: mol_type = other RNA
gtggagacagcggggtaggc

SEQ ID NO: 10050 - RNA, 20 nt, synthetic construct
  source 1..20: mol_type = other RNA
gtggaggcaggaggcggatt

SEQ ID NO: 10051 - RNA, 20 nt, synthetic construct
  source 1..20: mol_type = other RNA
gtgggtcaccatattcttgg

SEQ ID NO: 10052 - RNA, 20 nt, synthetic construct
  source 1..20: mol_type = other RNA
gtgggtcttttgggttttgc

SEQ ID NO: 10053 - RNA, 20 nt, synthetic construct
  source 1..20: mol_type = other RNA
gtggtcgggaaagaatccca

SEQ ID NO: 10054 - RNA, 20 nt, synthetic construct
  source 1..20: mol_type = other RNA
gtggtctccatgcgacgtgc

SEQ ID NO: 10055 - RNA, 20 nt, synthetic construct
  source 1..20: mol_type = other RNA
gtggttgaggatcctggaat

SEQ ID NO: 10056 - RNA, 20 nt, synthetic construct
  source 1..20: mol_type = other RNA
gtgtaaatagtgtctagttt

SEQ ID NO: 10057 - RNA, 20 nt, synthetic construct
  source 1..20: mol_type = other RNA
gtgtaaatgtatattaggaa

SEQ ID NO: 10058 - RNA, 20 nt, synthetic construct
  source 1..20: mol_type = other RNA
gtgtggattcgcactcctcc

SEQ ID NO: 10059 - RNA, 20 nt, synthetic construct
  source 1..20: mol_type = other RNA
gtgttgacataactgactac

SEQ ID NO: 10060 - RNA, 20 nt, synthetic construct
  source 1..20: mol_type = other RNA
gtgtttctcaaaggtggaga

SEQ ID NO: 10061 - RNA, 20 nt, synthetic construct
  source 1..20: mol_type = other RNA
gtgttttccaatgaggatta

SEQ ID NO: 10062 - RNA, 20 nt, synthetic construct
  source 1..20: mol_type = other RNA
gttaatcattacttccaaac

SEQ ID NO: 10063 - RNA, 20 nt, synthetic construct
  source 1..20: mol_type = other RNA
gttaccaaatatttaccatt

SEQ ID NO: 10064 - RNA, 21 nt, synthetic construct
  source 1..21: mol_type = other RNA
gttaccaattttcttttgtct

SEQ ID NO: 10065 - RNA, 20 nt, synthetic construct
  source 1..20: mol_type = other RNA
gttagtattccttggactca

SEQ ID NO: 10066 - RNA, 20 nt, synthetic construct
  source 1..20: mol_type = other RNA
gttatcgctggatgtgtctg

SEQ ID NO: 10067 - RNA, 20 nt, synthetic construct
  source 1..20: mol_type = other RNA
gttatgggtccttgccacaa

SEQ ID NO: 10068 - RNA, 20 nt, synthetic construct
  source 1..20: mol_type = other RNA
gttatgtcaacactaatatg

SEQ ID NO: 10069 - RNA, 20 nt, synthetic construct
  source 1..20: mol_type = other RNA
gttatgtcattggaagttat

SEQ ID NO: 10070 - RNA, 21 nt, synthetic construct
  source 1..21: mol_type = other RNA
gttcacattttttgataatgt

SEQ ID NO: 10071 - RNA, 20 nt, synthetic construct
  source 1..20: mol_type = other RNA
gttcaggtattgtttacaca

SEQ ID NO: 10072 - RNA, 20 nt, synthetic construct
  source 1..20: mol_type = other RNA
gttccccaccttatgagtcc

SEQ ID NO: 10073 - RNA, 21 nt, synthetic construct
  source 1..21: mol_type = other RNA
gttccccaccttatgagtcca

SEQ ID NO: 10074 - RNA, 20 nt, synthetic construct
  source 1..20: mol_type = other RNA
gttccccctagaaaattgag

SEQ ID NO: 10075 - RNA, 20 nt, synthetic construct
  source 1..20: mol_type = other RNA
aggagttccgcagtatggat

SEQ ID NO: 10076 - RNA, 20 nt, synthetic construct
  source 1..20: mol_type = other RNA
gttcttgtggcaaggaccca

SEQ ID NO: 10077 - RNA, 20 nt, synthetic construct
  source 1..20: mol_type = other RNA
gttgacattgcagagagtcc

SEQ ID NO: 10078 - RNA, 20 nt, synthetic construct
  source 1..20: mol_type = other RNA
gttgaggatcctggaattag

SEQ ID NO: 10079 - RNA, 20 nt, synthetic construct
  source 1..20: mol_type = other RNA
gttgataggataggggcatt

SEQ ID NO: 10080 - RNA, 21 nt, synthetic construct
  source 1..21: mol_type = other RNA
gttgataggataggggcattt

SEQ ID NO: 10081 - RNA, 20 nt, synthetic construct
  source 1..20: mol_type = other RNA
gttgcatggtgctggtgcgc

SEQ ID NO: 10082 - RNA, 20 nt, synthetic construct
  source 1..20: mol_type = other RNA
gttgcccaaggtcttacata

SEQ ID NO: 10083 - RNA, 20 nt, synthetic construct
  source 1..20: mol_type = other RNA
gttgccgggcaacggggtaa

SEQ ID NO: 10084 - RNA, 20 nt, synthetic construct
  source 1..20: mol_type = other RNA
gttggaggacaggaggttgg

SEQ ID NO: 10085 - RNA, 20 nt, synthetic construct
  source 1..20: mol_type = other RNA
gttggatccagccttcagag

SEQ ID NO: 10086 - RNA, 20 nt, synthetic construct
  source 1..20: mol_type = other RNA
gttgggggaggagattagat

SEQ ID NO: 10087 - RNA, 21 nt, synthetic construct
  source 1..21: mol_type = other RNA
gttgggggaggagattagatt

SEQ ID NO: 10088 - RNA, 20 nt, synthetic construct
  source 1..20: mol_type = other RNA
gttggtgagtgattggaggt

SEQ ID NO: 10089 - RNA, 20 nt, synthetic construct
  source 1..20: mol_type = other RNA
gttggttcttctggactatc

SEQ ID NO: 10090 - RNA, 20 nt, synthetic construct
  source 1..20: mol_type = other RNA
gtttaaagactgggaggagt

SEQ ID NO: 10091 - RNA, 21 nt, synthetic construct
  source 1..21: mol_type = other RNA
gtttaatacccttatccaatg

SEQ ID NO: 10092 - RNA, 20 nt, synthetic construct
  source 1..20: mol_type = other RNA
gtttacacagaaaggccttg

SEQ ID NO: 10093 - RNA, 20 nt, synthetic construct
  source 1..20: mol_type = other RNA
gtttacgtcccgtcggcgct

SEQ ID NO: 10094 - RNA, 20 nt, synthetic construct
  source 1..20: mol_type = other RNA
gtttactagtgccatttgtt

SEQ ID NO: 10095 - RNA, 21 nt, synthetic construct
  source 1..21: mol_type = other RNA
gtttactagtgccatttgttc

SEQ ID NO: 10096 - RNA, 20 nt, synthetic construct
  source 1..20: mol_type = other RNA
gtttactgctcctgaactgg

SEQ ID NO: 10097 - RNA, 20 nt, synthetic construct
  source 1..20: mol_type = other RNA
gtttcaccccaccgcacgga

SEQ ID NO: 10098 - RNA, 21 nt, synthetic construct
  source 1..21: mol_type = other RNA
gtttctcaaaggtggagacag

SEQ ID NO: 10099 - RNA, 20 nt, synthetic construct
  source 1..20: mol_type = other RNA
gtttgctccagacctgctgc

SEQ ID NO: 10100 - RNA, 20 nt, synthetic construct
  source 1..20: mol_type = other RNA
gtttggaagtaatgattaac

SEQ ID NO: 10101 - RNA, 20 nt, synthetic construct
  source 1..20: mol_type = other RNA
gtttggtacagcaacaggag

SEQ ID NO: 10102 - RNA, 20 nt, synthetic construct
  source 1..20: mol_type = other RNA
gtttgtttaaagactgggag

SEQ ID NO: 10103 - RNA, 21 nt, synthetic construct
  source 1..21: mol_type = other RNA
gttttccaatgaggattaaag

SEQ ID NO: 10104 - RNA, 20 nt, synthetic construct
  source 1..20: mol_type = other RNA
gttttgctcgcagcaggtct

SEQ ID NO: 10105 - RNA, 20 nt, synthetic construct
  source 1..20: mol_type = other RNA
gttttgctgccccatttaca

SEQ ID NO: 10106 - RNA, 20 nt, synthetic construct
  source 1..20: mol_type = other RNA
taaaacctagcaggcataat

SEQ ID NO: 10107 - RNA, 20 nt, synthetic construct
  source 1..20: mol_type = other RNA
taaaacgccgcagacacatc

SEQ ID NO: 10108 - RNA, 20 nt, synthetic construct
  source 1..20: mol_type = other RNA
ccgcagtatggatcggcaga

SEQ ID NO: 10109 - RNA, 20 nt, synthetic construct
  source 1..20: mol_type = other RNA
taaacaaaggacgtcccgcg

SEQ ID NO: 10110 - RNA, 20 nt, synthetic construct
  source 1..20: mol_type = other RNA
taaaccctaacaaaacaaag

SEQ ID NO: 10111 - RNA, 21 nt, synthetic construct
  source 1..21: mol_type = other RNA
taaaccttattatccagaaca

SEQ ID NO: 10112 - RNA, 20 nt, synthetic construct
  source 1..20: mol_type = other RNA
taaactgagccaggagaaac

SEQ ID NO: 10113 - RNA, 20 nt, synthetic construct
  source 1..20: mol_type = other RNA
taaagaatttggagctactg

SEQ ID NO: 10114 - RNA, 20 nt, synthetic construct
  source 1..20: mol_type = other RNA
taaagacaggtacagtagaa

SEQ ID NO: 10115 - RNA, 20 nt, synthetic construct
  source 1..20: mol_type = other RNA
taaagactgggaggagttgg

SEQ ID NO: 10116 - RNA, 21 nt, synthetic construct
  source 1..21: mol_type = other RNA
taaagagaggtgcgccccgtg

SEQ ID NO: 10117 - RNA, 20 nt, synthetic construct
  source 1..20: mol_type = other RNA
taaaggtctttgtactagga

SEQ ID NO: 10118 - RNA, 20 nt, synthetic construct
  source 1..20: mol_type = other RNA
taaagttcaggcaactcttg

SEQ ID NO: 10119 - RNA, 20 nt, synthetic construct
  source 1..20: mol_type = other RNA
taaatggggcagcaaaaccc

SEQ ID NO: 10120 - RNA, 20 nt, synthetic construct
  source 1..20: mol_type = other RNA
taaatgtatacccaaagaca

SEQ ID NO: 10121 - RNA, 20 nt, synthetic construct
  source 1..20: mol_type = other RNA
taacacccacccaggtagct

SEQ ID NO: 10122 - RNA, 20 nt, synthetic construct
  source 1..20: mol_type = other RNA
taacacgagaaggggtccta

SEQ ID NO: 10123 - RNA, 21 nt, synthetic construct
  source 1..21: mol_type = other RNA
taacagcggtaaaaagggact

SEQ ID NO: 10124 - RNA, 20 nt, synthetic construct
  source 1..20: mol_type = other RNA
taacaggcctattgattgga

SEQ ID NO: 10125 - RNA, 21 nt, synthetic construct
  source 1..21: mol_type = other RNA
taacattgaggttcccgagat

SEQ ID NO: 10126 - RNA, 20 nt, synthetic construct
  source 1..20: mol_type = other RNA
taaccacattgtgtaaatgg

SEQ ID NO: 10127 - RNA, 20 nt, synthetic construct
  source 1..20: mol_type = other RNA
taaccaggacaagttggagg

SEQ ID NO: 10128 - RNA, 20 nt, synthetic construct
  source 1..20: mol_type = other RNA
taactagatgttctggataa

SEQ ID NO: 10129 - RNA, 20 nt, synthetic construct
  source 1..20: mol_type = other RNA
taactgaaagccaaacagtg

SEQ ID NO: 10130 - RNA, 20 nt, synthetic construct
  source 1..20: mol_type = other RNA
taactgactactaggtctct

SEQ ID NO: 10131 - RNA, 21 nt, synthetic construct
  source 1..21: mol_type = other RNA
taagaggactcttggactctc

SEQ ID NO: 10132 - RNA, 20 nt, synthetic construct
  source 1..20: mol_type = other RNA
taagcaggctttcactttct

SEQ ID NO: 10133 - RNA, 20 nt, synthetic construct
  source 1..20: mol_type = other RNA
taagggagaggcagtagtcg

SEQ ID NO: 10134 - RNA, 20 nt, synthetic construct
  source 1..20: mol_type = other RNA
taaggtttaatacccttatc

SEQ ID NO: 10135 - RNA, 21 nt, synthetic construct
  source 1..21: mol_type = other RNA
taaggtttaatacccttatcc

SEQ ID NO: 10136 - RNA, 20 nt, synthetic construct
  source 1..20: mol_type = other RNA
taagttggcgagaaagtgaa

SEQ ID NO: 10137 - RNA, 21 nt, synthetic construct
  source 1..21: mol_type = other RNA
taataaggtttaataccctta

SEQ ID NO: 10138 - RNA, 20 nt, synthetic construct
  source 1..20: mol_type = other RNA
taatacccttatccaatggt

SEQ ID NO: 10139 - RNA, 20 nt, synthetic construct
  source 1..20: mol_type = other RNA
taatatacccgccttccata

SEQ ID NO: 10140 - RNA, 20 nt, synthetic construct
  source 1..20: mol_type = other RNA
taatatgggcctaaagttca

SEQ ID NO: 10141 - RNA, 21 nt, synthetic construct
  source 1..21: mol_type = other RNA
taatctcctcccccaactcct

SEQ ID NO: 10142 - RNA, 21 nt, synthetic construct
  source 1..21: mol_type = other RNA
taatgagaaaagaagattgca

SEQ ID NO: 10143 - RNA, 20 nt, synthetic construct
  source 1..20: mol_type = other RNA
taatgattaactagatgttc

SEQ ID NO: 10144 - RNA, 21 nt, synthetic construct
  source 1..21: mol_type = other RNA
taatgcccttgtatgcatgta

SEQ ID NO: 10145 - RNA, 20 nt, synthetic construct
  source 1..20: mol_type = other RNA
tacaaactgttcacattttt

SEQ ID NO: 10146 - RNA, 21 nt, synthetic construct
  source 1..21: mol_type = other RNA
tacaaactgttcacatttttt

SEQ ID NO: 10147 - RNA, 21 nt, synthetic construct
  source 1..21: mol_type = other RNA
tacacaatgtggttatcctgc

SEQ ID NO: 10148 - RNA, 20 nt, synthetic construct
  source 1..20: mol_type = other RNA
tacaccaagacattatcaaa

SEQ ID NO: 10149 - RNA, 20 nt, synthetic construct
  source 1..20: mol_type = other RNA
tacagagctgaggcggtatc

SEQ ID NO: 10150 - RNA, 20 nt, synthetic construct
  source 1..20: mol_type = other RNA
tacaggtgcaatttccgtcc

SEQ ID NO: 10151 - RNA, 20 nt, synthetic construct
  source 1..20: mol_type = other RNA
tacagtagaagaataaagac

SEQ ID NO: 10152 - RNA, 20 nt, synthetic construct
  source 1..20: mol_type = other RNA
tacatcgtatccatggctgc

SEQ ID NO: 10153 - RNA, 20 nt, synthetic construct
  source 1..20: mol_type = other RNA
taccaattttcttttgtctt

SEQ ID NO: 10154 - RNA, 20 nt, synthetic construct
  source 1..20: mol_type = other RNA
taccacatcatccatataac

SEQ ID NO: 10155 - RNA, 20 nt, synthetic construct
  source 1..20: mol_type = other RNA
taccattggataagggtatt

SEQ ID NO: 10156 - RNA, 20 nt, synthetic construct
  source 1..20: mol_type = other RNA
taccccgctgtctccacctt

SEQ ID NO: 10157 - RNA, 21 nt, synthetic construct
  source 1..21: mol_type = other RNA
taccccgttgcccggcaacgg

SEQ ID NO: 10158 - RNA, 21 nt, synthetic construct
  source 1..21: mol_type = other RNA
tacccgccttccatagagtgt

SEQ ID NO: 10159 - RNA, 20 nt, synthetic construct
  source 1..20: mol_type = other RNA
taccgcagagtctagactcg

SEQ ID NO: 10160 - RNA, 20 nt, synthetic construct
  source 1..20: mol_type = other RNA
taccgcctcagctctgtatc

SEQ ID NO: 10161 - RNA, 20 nt, synthetic construct
  source 1..20: mol_type = other RNA
tacctgaacctttaccccgt

SEQ ID NO: 10162 - RNA, 20 nt, synthetic construct
  source 1..20: mol_type = other RNA
tacctgggtgggtgttaatt

SEQ ID NO: 10163 - RNA, 20 nt, synthetic construct
  source 1..20: mol_type = other RNA
tacctgtctttaatcctcat

SEQ ID NO: 10164 - RNA, 20 nt, synthetic construct
  source 1..20: mol_type = other RNA
taccttgttggcgtctggcc

SEQ ID NO: 10165 - RNA, 20 nt, synthetic construct
  source 1..20: mol_type = other RNA
tacgatgtatatttgcggga

SEQ ID NO: 10166 - RNA, 20 nt, synthetic construct
  source 1..20: mol_type = other RNA
tactaacattgaggttcccg

SEQ ID NO: 10167 - RNA, 20 nt, synthetic construct
  source 1..20: mol_type = other RNA
tactaggaggctgtaggcat

SEQ ID NO: 10168 - RNA, 20 nt, synthetic construct
  source 1..20: mol_type = other RNA
tactagtgccatttgttcag

SEQ ID NO: 10169 - RNA, 20 nt, synthetic construct
  source 1..20: mol_type = other RNA
tactgaaggaaagaagtcag

SEQ ID NO: 10170 - RNA, 20 nt, synthetic construct
  source 1..20: mol_type = other RNA
tactgcctctcccttatcgt

SEQ ID NO: 10171 - RNA, 20 nt, synthetic construct
  source 1..20: mol_type = other RNA
tacttcaaagactgtttgtt

SEQ ID NO: 10172 - RNA, 21 nt, synthetic construct
  source 1..21: mol_type = other RNA
tactttccaatcaataggcct

SEQ ID NO: 10173 - RNA, 20 nt, synthetic construct
  source 1..20: mol_type = other RNA
tagaaaacttcctattaaca

SEQ ID NO: 10174 - RNA, 20 nt, synthetic construct
  source 1..20: mol_type = other RNA
tagaagaataaagaccagta

SEQ ID NO: 10175 - RNA, 20 nt, synthetic construct
  source 1..20: mol_type = other RNA
tagaagatctcgtactgaag

SEQ ID NO: 10176 - RNA, 20 nt, synthetic construct
  source 1..20: mol_type = other RNA
tagactctgcggtattgtga

SEQ ID NO: 10177 - RNA, 20 nt, synthetic construct
  source 1..20: mol_type = other RNA
tagagtatttggtgtctttc

SEQ ID NO: 10178 - RNA, 20 nt, synthetic construct
  source 1..20: mol_type = other RNA
tagagtcattagttcccccc

SEQ ID NO: 10179 - RNA, 20 nt, synthetic construct
  source 1..20: mol_type = other RNA
tagagtgtgtaaatagtgtc

SEQ ID NO: 10180 - RNA, 21 nt, synthetic construct
  source 1..21: mol_type = other RNA
tagatgttctggataataagg

SEQ ID NO: 10181 - RNA, 20 nt, synthetic construct
  source 1..20: mol_type = other RNA
tagattaaaggtctttgtac

SEQ ID NO: 10182 - RNA, 20 nt, synthetic construct
  source 1..20: mol_type = other RNA
tagattgaatacatgcatac

SEQ ID NO: 10183 - RNA, 20 nt, synthetic construct
  source 1..20: mol_type = other RNA
tagcagcaggatgaagagga

SEQ ID NO: 10184 - RNA, 21 nt, synthetic construct
  source 1..21: mol_type = other RNA
tagcagcaggatgaagaggaa

SEQ ID NO: 10185 - RNA, 20 nt, synthetic construct
  source 1..20: mol_type = other RNA
tagccgcttgttttgctcgc

SEQ ID NO: 10186 - RNA, 21 nt, synthetic construct
  source 1..21: mol_type = other RNA
tagccgcttgttttgctcgca

SEQ ID NO: 10187 - RNA, 20 nt, synthetic construct
  source 1..20: mol_type = other RNA
tagctccaaattctttataa

SEQ ID NO: 10188 - RNA, 20 nt, synthetic construct
  source 1..20: mol_type = other RNA
taggaaaagatggtgttttc

SEQ ID NO: 10189 - RNA, 20 nt, synthetic construct
  source 1..20: mol_type = other RNA
taggaattttccgaaagccc

SEQ ID NO: 10190 - RNA, 20 nt, synthetic construct
  source 1..20: mol_type = other RNA
taggaccccttctcgtgtta

SEQ ID NO: 10191 - RNA, 21 nt, synthetic construct
  source 1..21: mol_type = other RNA
taggcagaggtgaaaaagttg

SEQ ID NO: 10192 - RNA, 20 nt, synthetic construct
  source 1..20: mol_type = other RNA
taggcccacttacagttaat

SEQ ID NO: 10193 - RNA, 20 nt, synthetic construct
  source 1..20: mol_type = other RNA
taggctgccttcctgtctgg

SEQ ID NO: 10194 - RNA, 20 nt, synthetic construct
  source 1..20: mol_type = other RNA
tagggctttcccccactgtt

SEQ ID NO: 10195 - RNA, 20 nt, synthetic construct
  source 1..20: mol_type = other RNA
taggggcatttggtggtcta

SEQ ID NO: 10196 - RNA, 20 nt, synthetic construct
  source 1..20: mol_type = other RNA
tagggtttaaatgtataccc

SEQ ID NO: 10197 - RNA, 20 nt, synthetic construct
  source 1..20: mol_type = other RNA
tagtacaaagacctttaatc

SEQ ID NO: 10198 - RNA, 20 nt, synthetic construct
  source 1..20: mol_type = other RNA
tagtatgccctgagcctgag

SEQ ID NO: 10199 - RNA, 20 nt, synthetic construct
  source 1..20: mol_type = other RNA
tagtattccttggactcata

SEQ ID NO: 10200 - RNA, 20 nt, synthetic construct
  source 1..20: mol_type = other RNA
tagtccagaagaaccaacaa

SEQ ID NO: 10201 - RNA, 21 nt, synthetic construct
  source 1..21: mol_type = other RNA
tagtgttgacataactgacta

SEQ ID NO: 10202 - RNA, 20 nt, synthetic construct
  source 1..20: mol_type = other RNA
tagttccccctagaaaattg

SEQ ID NO: 10203 - RNA, 20 nt, synthetic construct
  source 1..20: mol_type = other RNA
tagtttccggaagtgttgat

SEQ ID NO: 10204 - RNA, 21 nt, synthetic construct
  source 1..21: mol_type = other RNA
tagtttggaagtaatgattaa

SEQ ID NO: 10205 - RNA, 20 nt, synthetic construct
  source 1..20: mol_type = other RNA
tataacggtttctcttccaa

SEQ ID NO: 10206 - RNA, 20 nt, synthetic construct
  source 1..20: mol_type = other RNA
tataactgaaagccaaacag

SEQ ID NO: 10207 - RNA, 20 nt, synthetic construct
  source 1..20: mol_type = other RNA
tataagagagaaacaacaca

SEQ ID NO: 10208 - RNA, 20 nt, synthetic construct
  source 1..20: mol_type = other RNA
tataatatacccgccttcca

SEQ ID NO: 10209 - RNA, 20 nt, synthetic construct
  source 1..20: mol_type = other RNA
tatacatttaaaccctaaca

SEQ ID NO: 10210 - RNA, 21 nt, synthetic construct
  source 1..21: mol_type = other RNA
tatacccaaagacaaaagaaa

SEQ ID NO: 10211 - RNA, 21 nt, synthetic construct
  source 1..21: mol_type = other RNA
tatagagtatttggtgtcttt

SEQ ID NO: 10212 - RNA, 20 nt, synthetic construct
  source 1..20: mol_type = other RNA
tatatggatgatgtggtatt

SEQ ID NO: 10213 - RNA, 20 nt, synthetic construct
  source 1..20: mol_type = other RNA
tatattatataagagagaaa

SEQ ID NO: 10214 - RNA, 21 nt, synthetic construct
  source 1..21: mol_type = other RNA
tatatttgcgggagaggacaa

SEQ ID NO: 10215 - RNA, 20 nt, synthetic construct
  source 1..20: mol_type = other RNA
tatcatcttcctcttcatcc

SEQ ID NO: 10216 - RNA, 20 nt, synthetic construct
  source 1..20: mol_type = other RNA
tatccatggctgctaggctg

SEQ ID NO: 10217 - RNA, 20 nt, synthetic construct
  source 1..20: mol_type = other RNA
tatccctcctgttgctgtac

SEQ ID NO: 10218 - RNA, 20 nt, synthetic construct
  source 1..20: mol_type = other RNA
tatcctatcaacacttccgg

SEQ ID NO: 10219 - RNA, 20 nt, synthetic construct
  source 1..20: mol_type = other RNA
tatctagaagatctcgtact

SEQ ID NO: 10220 - RNA, 20 nt, synthetic construct
  source 1..20: mol_type = other RNA
tatgatgtgttcttgtggca

SEQ ID NO: 10221 - RNA, 20 nt, synthetic construct
  source 1..20: mol_type = other RNA
tatgcctcaaggtcggtcgt

SEQ ID NO: 10222 - RNA, 20 nt, synthetic construct
  source 1..20: mol_type = other RNA
tatgcctgctaggttttatc

SEQ ID NO: 10223 - RNA, 21 nt, synthetic construct
  source 1..21: mol_type = other RNA
tatgcctgctaggttttatcc

SEQ ID NO: 10224 - RNA, 20 nt, synthetic construct
  source 1..20: mol_type = other RNA
tatggatcggcagaggagcc

SEQ ID NO: 10225 - RNA, 20 nt, synthetic construct
  source 1..20: mol_type = other RNA
tatggatgatgtggtattgg

SEQ ID NO: 10226 - RNA, 20 nt, synthetic construct
  source 1..20: mol_type = other RNA
tatggtgacccacaaaatga

SEQ ID NO: 10227 - RNA, 20 nt, synthetic construct
  source 1..20: mol_type = other RNA
tatggtgaggtgaacaatgc

SEQ ID NO: 10228 - RNA, 21 nt, synthetic construct
  source 1..21: mol_type = other RNA
tatgtaagaccttgggcaaca

SEQ ID NO: 10229 - RNA, 20 nt, synthetic construct
  source 1..20: mol_type = other RNA
tatgtatccctcctgttgct

SEQ ID NO: 10230 - RNA, 20 nt, synthetic construct
  source 1..20: mol_type = other RNA
tatgttgcccgtttgtcctc

SEQ ID NO: 10231 - RNA, 20 nt, synthetic construct
  source 1..20: mol_type = other RNA
tattaacaggcctattgatt

SEQ ID NO: 10232 - RNA, 21 nt, synthetic construct
  source 1..21: mol_type = other RNA
tattaacaggcctattgattg

SEQ ID NO: 10233 - RNA, 21 nt, synthetic construct
  source 1..21: mol_type = other RNA
tattaggaaaagatggtgttt

SEQ ID NO: 10234 - RNA, 20 nt, synthetic construct
  source 1..20: mol_type = other RNA
tattatccagaacatctagt

SEQ ID NO: 10235 - RNA, 20 nt, synthetic construct
  source 1..20: mol_type = other RNA
tattcccatcccatcatcct

SEQ ID NO: 10236 - RNA, 20 nt, synthetic construct
  source 1..20: mol_type = other RNA
tattccttggactcataagg

SEQ ID NO: 10237 - RNA, 21 nt, synthetic construct
  source 1..21: mol_type = other RNA
tattcttctactgtacctgtc

SEQ ID NO: 10238 - RNA, 21 nt, synthetic construct
  source 1..21: mol_type = other RNA
tattgattggaaagtatgtca

SEQ ID NO: 10239 - RNA, 20 nt, synthetic construct
  source 1..20: mol_type = other RNA
tattgggggccaagtctgta

SEQ ID NO: 10240 - RNA, 20 nt, synthetic construct
  source 1..20: mol_type = other RNA
tatttacacactctatggaa

SEQ ID NO: 10241 - RNA, 21 nt, synthetic construct
  source 1..21: mol_type = other RNA
tatttacacactctatggaag

SEQ ID NO: 10242 - RNA, 20 nt, synthetic construct
  source 1..20: mol_type = other RNA
tatttccctgctggtggctc

SEQ ID NO: 10243 - RNA, 20 nt, synthetic construct
  source 1..20: mol_type = other RNA
tatttgcgggagaggacaac

SEQ ID NO: 10244 - RNA, 20 nt, synthetic construct
  source 1..20: mol_type = other RNA
tatttggtaacctttggata

SEQ ID NO: 10245 - RNA, 20 nt, synthetic construct
  source 1..20: mol_type = other RNA
tcaacactaatatgggccta

SEQ ID NO: 10246 - RNA, 20 nt, synthetic construct
  source 1..20: mol_type = other RNA
tcaacgaattgtgggtcttt

SEQ ID NO: 10247 - RNA, 20 nt, synthetic construct
  source 1..20: mol_type = other RNA
tcaagatgctgtacagactt

SEQ ID NO: 10248 - RNA, 20 nt, synthetic construct
  source 1..20: mol_type = other RNA
tcaaggtcggtcgttgacat

SEQ ID NO: 10249 - RNA, 20 nt, synthetic construct
  source 1..20: mol_type = other RNA
tcaataggcctgttaatagg

SEQ ID NO: 10250 - RNA, 20 nt, synthetic construct
  source 1..20: mol_type = other RNA
tcaatcccaacaaggacacc

SEQ ID NO: 10251 - RNA, 20 nt, synthetic construct
  source 1..20: mol_type = other RNA
tcaatcttctcgaggattgg

SEQ ID NO: 10252 - RNA, 21 nt, synthetic construct
  source 1..21: mol_type = other RNA
tcaccaaactctgcaagatcc

SEQ ID NO: 10253 - RNA, 20 nt, synthetic construct
  source 1..20: mol_type = other RNA
tcaccatactgcactcaggc

SEQ ID NO: 10254 - RNA, 21 nt, synthetic construct
  source 1..21: mol_type = other RNA
tcaccatactgcactcaggca

SEQ ID NO: 10255 - RNA, 20 nt, synthetic construct
  source 1..20: mol_type = other RNA
tcaccatattcttgggaaca

SEQ ID NO: 10256 - RNA, 20 nt, synthetic construct
  source 1..20: mol_type = other RNA
tcacctcaccatactgcact

SEQ ID NO: 10257 - RNA, 20 nt, synthetic construct
  source 1..20: mol_type = other RNA
tcacctctgcacgtcgcatg

SEQ ID NO: 10258 - RNA, 21 nt, synthetic construct
  source 1..21: mol_type = other RNA
tcactctgggatcttgcagag

SEQ ID NO: 10259 - RNA, 20 nt, synthetic construct
  source 1..20: mol_type = other RNA
tcactttctcgccaacttac

SEQ ID NO: 10260 - RNA, 20 nt, synthetic construct
  source 1..20: mol_type = other RNA
tcagaaggcaaaaacgagag

SEQ ID NO: 10261 - RNA, 20 nt, synthetic construct
  source 1..20: mol_type = other RNA
tcagcccgtttctcctggct

SEQ ID NO: 10262 - RNA, 20 nt, synthetic construct
  source 1..20: mol_type = other RNA
tcaggcaagcaattctttgc

SEQ ID NO: 10263 - RNA, 20 nt, synthetic construct
  source 1..20: mol_type = other RNA
tcaggctcagggcatactac

SEQ ID NO: 10264 - RNA, 20 nt, synthetic construct
  source 1..20: mol_type = other RNA
tcagggcatactacaaactt

SEQ ID NO: 10265 - RNA, 20 nt, synthetic construct
  source 1..20: mol_type = other RNA
tcaggtattgtttacacaga

SEQ ID NO: 10266 - RNA, 21 nt, synthetic construct
  source 1..21: mol_type = other RNA
tcagtttactagtgccatttg

SEQ ID NO: 10267 - RNA, 20 nt, synthetic construct
  source 1..20: mol_type = other RNA
tcatccatataactgaaagc

SEQ ID NO: 10268 - RNA, 20 nt, synthetic construct
  source 1..20: mol_type = other RNA
tcattagttccccccagcaa

SEQ ID NO: 10269 - RNA, 20 nt, synthetic construct
  source 1..20: mol_type = other RNA
tccaaattctttataagggt

SEQ ID NO: 10270 - RNA, 20 nt, synthetic construct
  source 1..20: mol_type = other RNA
tccaactggtggtcgggaaa

SEQ ID NO: 10271 - RNA, 21 nt, synthetic construct
  source 1..21: mol_type = other RNA
tccaacttgtcctggttatcg

SEQ ID NO: 10272 - RNA, 20 nt, synthetic construct
  source 1..20: mol_type = other RNA
tccaagagtcctcttatgta

SEQ ID NO: 10273 - RNA, 20 nt, synthetic construct
  source 1..20: mol_type = other RNA
tccaaggaatactaacattg

SEQ ID NO: 10274 - RNA, 20 nt, synthetic construct
  source 1..20: mol_type = other RNA
tccaatcaataggcctgtta

SEQ ID NO: 10275 - RNA, 20 nt, synthetic construct
  source 1..20: mol_type = other RNA
tccacactccgaaagacacc

SEQ ID NO: 10276 - RNA, 20 nt, synthetic construct
  source 1..20: mol_type = other RNA
tccaccaatcgccagacagg

SEQ ID NO: 10277 - RNA, 20 nt, synthetic construct
  source 1..20: mol_type = other RNA
tccaccacgagtctagactc

SEQ ID NO: 10278 - RNA, 20 nt, synthetic construct
  source 1..20: mol_type = other RNA
tccaccccaaaaggcctccg

SEQ ID NO: 10279 - RNA, 20 nt, synthetic construct
  source 1..20: mol_type = other RNA
tccagcatctagagacctag

SEQ ID NO: 10280 - RNA, 20 nt, synthetic construct
  source 1..20: mol_type = other RNA
tccagccttcagagcaaaca

SEQ ID NO: 10281 - RNA, 20 nt, synthetic construct
  source 1..20: mol_type = other RNA
tccagttggcagcacagcct

SEQ ID NO: 10282 - RNA, 20 nt, synthetic construct
  source 1..20: mol_type = other RNA
tccatgccccaaagccaccc

SEQ ID NO: 10283 - RNA, 20 nt, synthetic construct
  source 1..20: mol_type = other RNA
tccatgcgacgtgcagaggt

SEQ ID NO: 10284 - RNA, 20 nt, synthetic construct
  source 1..20: mol_type = other RNA
tcccaacaaggacacctggc

SEQ ID NO: 10285 - RNA, 21 nt, synthetic construct
  source 1..21: mol_type = other RNA
tcccaagaatatggtgaccca

SEQ ID NO: 10286 - RNA, 20 nt, synthetic construct
  source 1..20: mol_type = other RNA
tcccagaggattgctggtgg

SEQ ID NO: 10287 - RNA, 20 nt, synthetic construct
  source 1..20: mol_type = other RNA
tcccataggaattttccgaa

SEQ ID NO: 10288 - RNA, 20 nt, synthetic construct
  source 1..20: mol_type = other RNA
tcccatcatcctgggctttc

SEQ ID NO: 10289 - RNA, 21 nt, synthetic construct
  source 1..21: mol_type = other RNA
tcccatcatcctgggctttcg

SEQ ID NO: 10290 - RNA, 20 nt, synthetic construct
  source 1..20: mol_type = other RNA
tccccaatcctcgagaagat

SEQ ID NO: 10291 - RNA, 21 nt, synthetic construct
  source 1..21: mol_type = other RNA
tccccaatcctcgagaagatt

SEQ ID NO: 10292 - RNA, 20 nt, synthetic construct
  source 1..20: mol_type = other RNA
tccccaccttatgagtccaa

SEQ ID NO: 10293 - RNA, 20 nt, synthetic construct
  source 1..20: mol_type = other RNA
tccccctagaaaattgagag

SEQ ID NO: 10294 - RNA, 20 nt, synthetic construct
  source 1..20: mol_type = other RNA
tcccgaccaccagttggatc

SEQ ID NO: 10295 - RNA, 20 nt, synthetic construct
  source 1..20: mol_type = other RNA
tccctgctggtggctccagt

SEQ ID NO: 10296 - RNA, 20 nt, synthetic construct
  source 1..20: mol_type = other RNA
tcccttatcgtcaatcttct

SEQ ID NO: 10297 - RNA, 21 nt, synthetic construct
  source 1..21: mol_type = other RNA
tcccttatcgtcaatcttctc

SEQ ID NO: 10298 - RNA, 20 nt, synthetic construct
  source 1..20: mol_type = other RNA
tccctttttaccgctgttac

SEQ ID NO: 10299 - RNA, 20 nt, synthetic construct
  source 1..20: mol_type = other RNA
tccgaaagcccaggatgatg

SEQ ID NO: 10300 - RNA, 20 nt, synthetic construct
  source 1..20: mol_type = other RNA
tccgaaggtttggtacagca

SEQ ID NO: 10301 - RNA, 20 nt, synthetic construct
  source 1..20: mol_type = other RNA
tccgcaggattcagcgccga

SEQ ID NO: 10302 - RNA, 21 nt, synthetic construct
  source 1..21: mol_type = other RNA
ctagactcgtggtggacttct

SEQ ID NO: 10303 - RNA, 20 nt, synthetic construct
  source 1..20: mol_type = other RNA
tccggaagtgttgataggat

SEQ ID NO: 10304 - RNA, 20 nt, synthetic construct
  source 1..20: mol_type = other RNA
tccggcagatgagaaggcac

SEQ ID NO: 10305 - RNA, 20 nt, synthetic construct
  source 1..20: mol_type = other RNA
tccgtccgaaggtttggtac

SEQ ID NO: 10306 - RNA, 20 nt, synthetic construct
  source 1..20: mol_type = other RNA
tcctaatatacatttacacc

SEQ ID NO: 10307 - RNA, 21 nt, synthetic construct
  source 1..21: mol_type = other RNA
tcctaccttgttggcgtctgg

SEQ ID NO: 10308 - RNA, 20 nt, synthetic construct
  source 1..20: mol_type = other RNA
tcctactgttcaagcctcca

SEQ ID NO: 10309 - RNA, 20 nt, synthetic construct
  source 1..20: mol_type = other RNA
tcctagccgcttgttttgct

SEQ ID NO: 10310 - RNA, 21 nt, synthetic construct
  source 1..21: mol_type = other RNA
tcctagtacaaagacctttaa

SEQ ID NO: 10311 - RNA, 20 nt, synthetic construct
  source 1..20: mol_type = other RNA
tcctccagcttatagaccac

SEQ ID NO: 10312 - RNA, 20 nt, synthetic construct
  source 1..20: mol_type = other RNA
tcctcgagaagattgacgat

SEQ ID NO: 10313 - RNA, 20 nt, synthetic construct
  source 1..20: mol_type = other RNA
tcctctaattccaggatcct

SEQ ID NO: 10314 - RNA, 20 nt, synthetic construct
  source 1..20: mol_type = other RNA
gagaagtccaccacgagtct

SEQ ID NO: 10315 - RNA, 20 nt, synthetic construct
  source 1..20: mol_type = other RNA
tcctcttatgtaagaccttg

SEQ ID NO: 10316 - RNA, 20 nt, synthetic construct
  source 1..20: mol_type = other RNA
tcctcttcatcctgctgcta

SEQ ID NO: 10317 - RNA, 20 nt, synthetic construct
  source 1..20: mol_type = other RNA
tcctgaactggagccaccag

SEQ ID NO: 10318 - RNA, 20 nt, synthetic construct
  source 1..20: mol_type = other RNA
tcctgcctccaccaatcgcc

SEQ ID NO: 10319 - RNA, 20 nt, synthetic construct
  source 1..20: mol_type = other RNA
tcctgcggacgacccttctc

SEQ ID NO: 10320 - RNA, 20 nt, synthetic construct
  source 1..20: mol_type = other RNA
tcctggaattagaggacaaa

SEQ ID NO: 10321 - RNA, 20 nt, synthetic construct
  source 1..20: mol_type = other RNA
tcctgtcctccaacttgtcc

SEQ ID NO: 10322 - RNA, 20 nt, synthetic construct
  source 1..20: mol_type = other RNA
tcctgtctggcgattggtgg

SEQ ID NO: 10323 - RNA, 20 nt, synthetic construct
  source 1..20: mol_type = other RNA
tccttcagtacgagatcttc

SEQ ID NO: 10324 - RNA, 20 nt, synthetic construct
  source 1..20: mol_type = other RNA
tccttgagcagtagtcatgc

SEQ ID NO: 10325 - RNA, 20 nt, synthetic construct
  source 1..20: mol_type = other RNA
tccttggactcataaggtgg

SEQ ID NO: 10326 - RNA, 20 nt, synthetic construct
  source 1..20: mol_type = other RNA
tcctttgtttacgtcccgtc

SEQ ID NO: 10327 - RNA, 20 nt, synthetic construct
  source 1..20: mol_type = other RNA
tcgacccttataaagaattt

SEQ ID NO: 10328 - RNA, 20 nt, synthetic construct
  source 1..20: mol_type = other RNA
tcgagaagattgacgataag

SEQ ID NO: 10329 - RNA, 20 nt, synthetic construct
  source 1..20: mol_type = other RNA
tcgcagaagatctcaatctc

SEQ ID NO: 10330 - RNA, 20 nt, synthetic construct
  source 1..20: mol_type = other RNA
tcgcagacgaaggtctcaat

SEQ ID NO: 10331 - RNA, 20 nt, synthetic construct
  source 1..20: mol_type = other RNA
tcggaaaattcctatgggag

SEQ ID NO: 10332 - RNA, 20 nt, synthetic construct
  source 1..20: mol_type = other RNA
tcggaacggcagacggagaa

SEQ ID NO: 10333 - RNA, 20 nt, synthetic construct
  source 1..20: mol_type = other RNA
tcggcatggtcccgtgctgg

SEQ ID NO: 10334 - RNA, 20 nt, synthetic construct
  source 1..20: mol_type = other RNA
tcggcgctgaatcctgcgga

SEQ ID NO: 10335 - RNA, 20 nt, synthetic construct
  source 1..20: mol_type = other RNA
tcggtcggaacggcagacgg

SEQ ID NO: 10336 - RNA, 20 nt, synthetic construct
  source 1..20: mol_type = other RNA
tcggtcgttgacattgcaga

SEQ ID NO: 10337 - RNA, 20 nt, synthetic construct
  source 1..20: mol_type = other RNA
tcgtactgaaggaaagaagt

SEQ ID NO: 10338 - RNA, 20 nt, synthetic construct
  source 1..20: mol_type = other RNA
tcgtcaatcttctcgaggat

SEQ ID NO: 10339 - RNA, 20 nt, synthetic construct
  source 1..20: mol_type = other RNA
tcgtccgcaggattcagcgc

SEQ ID NO: 10340 - RNA, 20 nt, synthetic construct
  source 1..20: mol_type = other RNA
tcgttgacatactttccaat

SEQ ID NO: 10341 - RNA, 20 nt, synthetic construct
  source 1..20: mol_type = other RNA
tctaacaacagtagtttccg

SEQ ID NO: 10342 - RNA, 20 nt, synthetic construct
  source 1..20: mol_type = other RNA
tctaaggcttcccgatacag

SEQ ID NO: 10343 - RNA, 20 nt, synthetic construct
  source 1..20: mol_type = other RNA
tctaattccaggatcctcaa

SEQ ID NO: 10344 - RNA, 20 nt, synthetic construct
  source 1..20: mol_type = other RNA
tctagaagatctcgtactga

SEQ ID NO: 10345 - RNA, 20 nt, synthetic construct
  source 1..20: mol_type = other RNA
tctagactctgcggtattgt

SEQ ID NO: 10346 - RNA, 20 nt, synthetic construct
  source 1..20: mol_type = other RNA
tctagttaatcattacttcc

SEQ ID NO: 10347 - RNA, 20 nt, synthetic construct
  source 1..20: mol_type = other RNA
tctagtttggaagtaatgat

SEQ ID NO: 10348 - RNA, 20 nt, synthetic construct
  source 1..20: mol_type = other RNA
tctataacggtttctcttcc

SEQ ID NO: 10349 - RNA, 20 nt, synthetic construct
  source 1..20: mol_type = other RNA
tctataagctggaggagtgc

SEQ ID NO: 10350 - RNA, 20 nt, synthetic construct
  source 1..20: mol_type = other RNA
tctcaaaggtggagacagcg

SEQ ID NO: 10351 - RNA, 20 nt, synthetic construct
  source 1..20: mol_type = other RNA
tctcaatcgccgcgtcgcag

SEQ ID NO: 10352 - RNA, 20 nt, synthetic construct
  source 1..20: mol_type = other RNA
tctcactctgggatcttgca

SEQ ID NO: 10353 - RNA, 20 nt, synthetic construct
  source 1..20: mol_type = other RNA
tctccgtctgccgttccgac

SEQ ID NO: 10354 - RNA, 20 nt, synthetic construct
  source 1..20: mol_type = other RNA
tctcctcccccaactcctcc

SEQ ID NO: 10355 - RNA, 20 nt, synthetic construct
  source 1..20: mol_type = other RNA
tctcctgagcattgttcacc

SEQ ID NO: 10356 - RNA, 20 nt, synthetic construct
  source 1..20: mol_type = other RNA
tctctagatgctggatcttc

SEQ ID NO: 10357 - RNA, 20 nt, synthetic construct
  source 1..20: mol_type = other RNA
tctctcttatataatatacc

SEQ ID NO: 10358 - RNA, 20 nt, synthetic construct
  source 1..20: mol_type = other RNA
tctcttccaaaagtgagaca

SEQ ID NO: 10359 - RNA, 21 nt, synthetic construct
  source 1..21: mol_type = other RNA
tctgacttctttccttcagta

SEQ ID NO: 10360 - RNA, 20 nt, synthetic construct
  source 1..20: mol_type = other RNA
tctgcaagatcccagagtga

SEQ ID NO: 10361 - RNA, 20 nt, synthetic construct
  source 1..20: mol_type = other RNA
tctgccgttccgaccgacca

SEQ ID NO: 10362 - RNA, 20 nt, synthetic construct
  source 1..20: mol_type = other RNA
tctggactatcaaggtatgt

SEQ ID NO: 10363 - RNA, 21 nt, synthetic construct
  source 1..21: mol_type = other RNA
tctggagcaaacattatcggg

SEQ ID NO: 10364 - RNA, 20 nt, synthetic construct
  source 1..20: mol_type = other RNA
tctggccaggtgtccttgtt

SEQ ID NO: 10365 - RNA, 20 nt, synthetic construct
  source 1..20: mol_type = other RNA
tctggcgattggtggaggca

SEQ ID NO: 10366 - RNA, 20 nt, synthetic construct
  source 1..20: mol_type = other RNA
tctgtgccttctcatctgcc

SEQ ID NO: 10367 - RNA, 20 nt, synthetic construct
  source 1..20: mol_type = other RNA
tcttacataagaggactctt

SEQ ID NO: 10368 - RNA, 20 nt, synthetic construct
  source 1..20: mol_type = other RNA
tcttccaaaagtgagacaag

SEQ ID NO: 10369 - RNA, 20 nt, synthetic construct
  source 1..20: mol_type = other RNA
tcttctactgtacctgtctt

SEQ ID NO: 10370 - RNA, 20 nt, synthetic construct
  source 1..20: mol_type = other RNA
tcttctgcgacgcggcgatt

SEQ ID NO: 10371 - RNA, 20 nt, synthetic construct
  source 1..20: mol_type = other RNA
tcttcttttctcattaactg

SEQ ID NO: 10372 - RNA, 20 nt, synthetic construct
  source 1..20: mol_type = other RNA
tcttggactctctgcaatgt

SEQ ID NO: 10373 - RNA, 20 nt, synthetic construct
  source 1..20: mol_type = other RNA
tcttggtgtaaatgtatatt

SEQ ID NO: 10374 - RNA, 20 nt, synthetic construct
  source 1..20: mol_type = other RNA
tcttgtctcacttttggaag

SEQ ID NO: 10375 - RNA, 20 nt, synthetic construct
  source 1..20: mol_type = other RNA
tcttgttcccaagaatatgg

SEQ ID NO: 10376 - RNA, 20 nt, synthetic construct
  source 1..20: mol_type = other RNA
tctttaaacaaacagtcttt

SEQ ID NO: 10377 - RNA, 20 nt, synthetic construct
  source 1..20: mol_type = other RNA
tctttaatcctcattggaaa

SEQ ID NO: 10378 - RNA, 20 nt, synthetic construct
  source 1..20: mol_type = other RNA
tctttccaccagcaatcctc

SEQ ID NO: 10379 - RNA, 20 nt, synthetic construct
  source 1..20: mol_type = other RNA
tctttgctggggggaactaa

SEQ ID NO: 10380 - RNA, 20 nt, synthetic construct
  source 1..20: mol_type = other RNA
tctttgtactaggaggctgt

SEQ ID NO: 10381 - RNA, 20 nt, synthetic construct
  source 1..20: mol_type = other RNA
tctttgttttgttagggttt

SEQ ID NO: 10382 - RNA, 20 nt, synthetic construct
  source 1..20: mol_type = other RNA
tcttttcctaatatacattt

SEQ ID NO: 10383 - RNA, 20 nt, synthetic construct
  source 1..20: mol_type = other RNA
tgaaaccacaagagttgcct

SEQ ID NO: 10384 - RNA, 20 nt, synthetic construct
  source 1..20: mol_type = other RNA
tgaaagccaaacagtggggg

SEQ ID NO: 10385 - RNA, 20 nt, synthetic construct
  source 1..20: mol_type = other RNA
tgaacaagagatgattaggc

SEQ ID NO: 10386 - RNA, 20 nt, synthetic construct
  source 1..20: mol_type = other RNA
tgaacagtaggacatgaaca

SEQ ID NO: 10387 - RNA, 21 nt, synthetic construct
  source 1..21: mol_type = other RNA
tgaacagtttgtaggcccact

SEQ ID NO: 10388 - RNA, 20 nt, synthetic construct
  source 1..20: mol_type = other RNA
tgaacatggagaacatcaca

SEQ ID NO: 10389 - RNA, 21 nt, synthetic construct
  source 1..21: mol_type = other RNA
tgaacatggagaacatcacat

SEQ ID NO: 10390 - RNA, 20 nt, synthetic construct
  source 1..20: mol_type = other RNA
tgaacctttaccccgttgcc

SEQ ID NO: 10391 - RNA, 20 nt, synthetic construct
  source 1..20: mol_type = other RNA
tgaactggagccaccagcag

SEQ ID NO: 10392 - RNA, 20 nt, synthetic construct
  source 1..20: mol_type = other RNA
tgaagaggaagatgataaaa

SEQ ID NO: 10393 - RNA, 20 nt, synthetic construct
  source 1..20: mol_type = other RNA
tgaaggctggatccaactgg

SEQ ID NO: 10394 - RNA, 20 nt, synthetic construct
  source 1..20: mol_type = other RNA
tgacataacccataaaattc

SEQ ID NO: 10395 - RNA, 21 nt, synthetic construct
  source 1..21: mol_type = other RNA
tgacataacccataaaattca

SEQ ID NO: 10396 - RNA, 20 nt, synthetic construct
  source 1..20: mol_type = other RNA
tgacatactttccaatcaat

SEQ ID NO: 10397 - RNA, 20 nt, synthetic construct
  source 1..20: mol_type = other RNA
tgacattgcagagagtccaa

SEQ ID NO: 10398 - RNA, 20 nt, synthetic construct
  source 1..20: mol_type = other RNA
tgaccaagccccagccagtg

SEQ ID NO: 10399 - RNA, 20 nt, synthetic construct
  source 1..20: mol_type = other RNA
tgacgataagggagaggcag

SEQ ID NO: 10400 - RNA, 20 nt, synthetic construct
  source 1..20: mol_type = other RNA
tgacgcaacccccactggct

SEQ ID NO: 10401 - RNA, 21 nt, synthetic construct
  source 1..21: mol_type = other RNA
tgactactaggtctctagatg

SEQ ID NO: 10402 - RNA, 20 nt, synthetic construct
  source 1..20: mol_type = other RNA
tgacttctttccttcagtac

SEQ ID NO: 10403 - RNA, 20 nt, synthetic construct
  source 1..20: mol_type = other RNA
tgagaaaagaagattgcaat

SEQ ID NO: 10404 - RNA, 20 nt, synthetic construct
  source 1..20: mol_type = other RNA
tgagaccttcgtctgcgagg

SEQ ID NO: 10405 - RNA, 20 nt, synthetic construct
  source 1..20: mol_type = other RNA
tgagatcttctgcgacgcgg

SEQ ID NO: 10406 - RNA, 20 nt, synthetic construct
  source 1..20: mol_type = other RNA
tgagccaggagaaacgggct

SEQ ID NO: 10407 - RNA, 20 nt, synthetic construct
  source 1..20: mol_type = other RNA
tgagcctgagggctccaccc

SEQ ID NO: 10408 - RNA, 20 nt, synthetic construct
  source 1..20: mol_type = other RNA
tgaggatgagtgtttctcaa

SEQ ID NO: 10409 - RNA, 20 nt, synthetic construct
  source 1..20: mol_type = other RNA
tgaggattcttgtcaacaag

SEQ ID NO: 10410 - RNA, 20 nt, synthetic construct
  source 1..20: mol_type = other RNA
tgaggcatagcagcaggatg

SEQ ID NO: 10411 - RNA, 20 nt, synthetic construct
  source 1..20: mol_type = other RNA
tgaggtgaacaatgctcagg

SEQ ID NO: 10412 - RNA, 20 nt, synthetic construct
  source 1..20: mol_type = other RNA
tgagtccctttttaccgctg

SEQ ID NO: 10413 - RNA, 20 nt, synthetic construct
  source 1..20: mol_type = other RNA
tgagtgcagtatggtgaggt

SEQ ID NO: 10414 - RNA, 21 nt, synthetic construct
  source 1..21: mol_type = other RNA
tgagtgcagtatggtgaggtg

SEQ ID NO: 10415 - RNA, 20 nt, synthetic construct
  source 1..20: mol_type = other RNA
tgagtgtttctcaaaggtgg

SEQ ID NO: 10416 - RNA, 20 nt, synthetic construct
  source 1..20: mol_type = other RNA
tgatagtccagaagaaccaa

SEQ ID NO: 10417 - RNA, 20 nt, synthetic construct
  source 1..20: mol_type = other RNA
tgatgggatgggaatacagg

SEQ ID NO: 10418 - RNA, 21 nt, synthetic construct
  source 1..21: mol_type = other RNA
tgatgttctccatgttcagcg

SEQ ID NO: 10419 - RNA, 20 nt, synthetic construct
  source 1..20: mol_type = other RNA
tgattggaaagtatgtcaac

SEQ ID NO: 10420 - RNA, 20 nt, synthetic construct
  source 1..20: mol_type = other RNA
tgattggaggttggggactg

SEQ ID NO: 10421 - RNA, 20 nt, synthetic construct
  source 1..20: mol_type = other RNA
tgcaagatcccagagtgaga

SEQ ID NO: 10422 - RNA, 20 nt, synthetic construct
  source 1..20: mol_type = other RNA
tgcaattgattatgcctgct

SEQ ID NO: 10423 - RNA, 20 nt, synthetic construct
  source 1..20: mol_type = other RNA
tgcacacggtccggcagatg

SEQ ID NO: 10424 - RNA, 20 nt, synthetic construct
  source 1..20: mol_type = other RNA
tgcatacaagggcattaacg

SEQ ID NO: 10425 - RNA, 20 nt, synthetic construct
  source 1..20: mol_type = other RNA
tgcatgtattcaatctaagc

SEQ ID NO: 10426 - RNA, 20 nt, synthetic construct
  source 1..20: mol_type = other RNA
tgccaactggatcctgcgcg

SEQ ID NO: 10427 - RNA, 20 nt, synthetic construct
  source 1..20: mol_type = other RNA
tgccacaagaacacatcata

SEQ ID NO: 10428 - RNA, 20 nt, synthetic construct
  source 1..20: mol_type = other RNA
tgcccaaggtcttacataag

SEQ ID NO: 10429 - RNA, 20 nt, synthetic construct
  source 1..20: mol_type = other RNA
tgcccgtttgtcctctaatt

SEQ ID NO: 10430 - RNA, 21 nt, synthetic construct
  source 1..21: mol_type = other RNA
tgcccgtttgtcctctaattc

SEQ ID NO: 10431 - RNA, 20 nt, synthetic construct
  source 1..20: mol_type = other RNA
tgcccttgtatgcatgtatt

SEQ ID NO: 10432 - RNA, 20 nt, synthetic construct
  source 1..20: mol_type = other RNA
tgccgaacctgcatgactac

SEQ ID NO: 10433 - RNA, 20 nt, synthetic construct
  source 1..20: mol_type = other RNA
tgccgttccgaccgaccacg

SEQ ID NO: 10434 - RNA, 20 nt, synthetic construct
  source 1..20: mol_type = other RNA
tgcctacagcctcctagtac

SEQ ID NO: 10435 - RNA, 20 nt, synthetic construct
  source 1..20: mol_type = other RNA
tgcctccaccaatcgccaga

SEQ ID NO: 10436 - RNA, 20 nt, synthetic construct
  source 1..20: mol_type = other RNA
tgcctgagtgcagtatggtg

SEQ ID NO: 10437 - RNA, 20 nt, synthetic construct
  source 1..20: mol_type = other RNA
tgcctgctaggttttatcca

SEQ ID NO: 10438 - RNA, 20 nt, synthetic construct
  source 1..20: mol_type = other RNA
tgcgacgtgcagaggtgaag

SEQ ID NO: 10439 - RNA, 20 nt, synthetic construct
  source 1..20: mol_type = other RNA
tgcgagcaaaacaagcggct

SEQ ID NO: 10440 - RNA, 21 nt, synthetic construct
  source 1..21: mol_type = other RNA
tgcggtggggtgaaacccagc

SEQ ID NO: 10441 - RNA, 20 nt, synthetic construct
  source 1..20: mol_type = other RNA
tgctaggctgtgctgccaac

SEQ ID NO: 10442 - RNA, 20 nt, synthetic construct
  source 1..20: mol_type = other RNA
tgctaggttttatccaaagg

SEQ ID NO: 10443 - RNA, 20 nt, synthetic construct
  source 1..20: mol_type = other RNA
tgctccagacctgctgcgag

SEQ ID NO: 10444 - RNA, 20 nt, synthetic construct
  source 1..20: mol_type = other RNA
tgctccagctcctaccttgt

SEQ ID NO: 10445 - RNA, 20 nt, synthetic construct
  source 1..20: mol_type = other RNA
tgctcctgaactggagccac

SEQ ID NO: 10446 - RNA, 20 nt, synthetic construct
  source 1..20: mol_type = other RNA
tgctcgcagcaggtctggag

SEQ ID NO: 10447 - RNA, 20 nt, synthetic construct
  source 1..20: mol_type = other RNA
tgctggcaaagtttgtagta

SEQ ID NO: 10448 - RNA, 20 nt, synthetic construct
  source 1..20: mol_type = other RNA
tgctggtggctccagttcag

SEQ ID NO: 10449 - RNA, 21 nt, synthetic construct
  source 1..21: mol_type = other RNA
tgctggtggctccagttcagg

SEQ ID NO: 10450 - RNA, 20 nt, synthetic construct
  source 1..20: mol_type = other RNA
tgctggtggttgaggatcct

SEQ ID NO: 10451 - RNA, 20 nt, synthetic construct
  source 1..20: mol_type = other RNA
tgctgtacagacttggcccc

SEQ ID NO: 10452 - RNA, 20 nt, synthetic construct
  source 1..20: mol_type = other RNA
tgctgtaccaaaccttcgga

SEQ ID NO: 10453 - RNA, 21 nt, synthetic construct
  source 1..21: mol_type = other RNA
tgctgtaccaaaccttcggac

SEQ ID NO: 10454 - RNA, 20 nt, synthetic construct
  source 1..20: mol_type = other RNA
tgctgtagatcttgttccca

SEQ ID NO: 10455 - RNA, 20 nt, synthetic construct
  source 1..20: mol_type = other RNA
tggaaaacaccatcttttcc

SEQ ID NO: 10456 - RNA, 21 nt, synthetic construct
  source 1..21: mol_type = other RNA
tggaaagtatgtcaacgaatt

SEQ ID NO: 10457 - RNA, 20 nt, synthetic construct
  source 1..20: mol_type = other RNA
tggaaccttttcggctcctc

SEQ ID NO: 10458 - RNA, 21 nt, synthetic construct
  source 1..21: mol_type = other RNA
tggaaccttttcggctcctct

SEQ ID NO: 10459 - RNA, 20 nt, synthetic construct
  source 1..20: mol_type = other RNA
tggaaggcgggtatattata

SEQ ID NO: 10460 - RNA, 20 nt, synthetic construct
  source 1..20: mol_type = other RNA
tggacatcgacccttataaa

SEQ ID NO: 10461 - RNA, 20 nt, synthetic construct
  source 1..20: mol_type = other RNA
tggactctctgcaatgtcaa

SEQ ID NO: 10462 - RNA, 20 nt, synthetic construct
  source 1..20: mol_type = other RNA
caccacgagtctagactctg

SEQ ID NO: 10463 - RNA, 20 nt, synthetic construct
  source 1..20: mol_type = other RNA
tggataaaacctagcaggca

SEQ ID NO: 10464 - RNA, 20 nt, synthetic construct
  source 1..20: mol_type = other RNA
tggatacgatgtatatttgc

SEQ ID NO: 10465 - RNA, 20 nt, synthetic construct
  source 1..20: mol_type = other RNA
tggatccaactggtggtcgg

SEQ ID NO: 10466 - RNA, 20 nt, synthetic construct
  source 1..20: mol_type = other RNA
tggatcggcagaggagccga

SEQ ID NO: 10467 - RNA, 21 nt, synthetic construct
  source 1..21: mol_type = other RNA
tggatgatgtggtattggggg

SEQ ID NO: 10468 - RNA, 20 nt, synthetic construct
  source 1..20: mol_type = other RNA
tggatttgctgtgtttgctc

SEQ ID NO: 10469 - RNA, 20 nt, synthetic construct
  source 1..20: mol_type = other RNA
tggcaaggacccataacttc

SEQ ID NO: 10470 - RNA, 20 nt, synthetic construct
  source 1..20: mol_type = other RNA
tggcactagtaaactgagcc

SEQ ID NO: 10471 - RNA, 21 nt, synthetic construct
  source 1..21: mol_type = other RNA
tggcagcacagcctagcagcc

SEQ ID NO: 10472 - RNA, 20 nt, synthetic construct
  source 1..20: mol_type = other RNA
tggccaaaattcgcagtccc

SEQ ID NO: 10473 - RNA, 20 nt, synthetic construct
  source 1..20: mol_type = other RNA
tggccagacgccaacaaggt

SEQ ID NO: 10474 - RNA, 20 nt, synthetic construct
  source 1..20: mol_type = other RNA
tggcgattggtggaggcagg

SEQ ID NO: 10475 - RNA, 20 nt, synthetic construct
  source 1..20: mol_type = other RNA
tggctccagttcaggagcag

SEQ ID NO: 10476 - RNA, 20 nt, synthetic construct
  source 1..20: mol_type = other RNA
tggctgctaggctgtgctgc

SEQ ID NO: 10477 - RNA, 20 nt, synthetic construct
  source 1..20: mol_type = other RNA
tggctttggggcatggacat

SEQ ID NO: 10478 - RNA, 20 nt, synthetic construct
  source 1..20: mol_type = other RNA
tgggaacaagatctacagca

SEQ ID NO: 10479 - RNA, 20 nt, synthetic construct
  source 1..20: mol_type = other RNA
tgggacttcaatcccaacaa

SEQ ID NO: 10480 - RNA, 20 nt, synthetic construct
  source 1..20: mol_type = other RNA
tgggatcttgcagagtttgg

SEQ ID NO: 10481 - RNA, 20 nt, synthetic construct
  source 1..20: mol_type = other RNA
tgggattctttcccgaccac

SEQ ID NO: 10482 - RNA, 20 nt, synthetic construct
  source 1..20: mol_type = other RNA
tgggattgaagtcccaatct

SEQ ID NO: 10483 - RNA, 20 nt, synthetic construct
  source 1..20: mol_type = other RNA
tgggccatcagcgcgtgcgt

SEQ ID NO: 10484 - RNA, 20 nt, synthetic construct
  source 1..20: mol_type = other RNA
tggggaccctgcgctgaaca

SEQ ID NO: 10485 - RNA, 20 nt, synthetic construct
  source 1..20: mol_type = other RNA
tggggactgcgaattttggc

SEQ ID NO: 10486 - RNA, 20 nt, synthetic construct
  source 1..20: mol_type = other RNA
tggggcagaatctttccacc

SEQ ID NO: 10487 - RNA, 20 nt, synthetic construct
  source 1..20: mol_type = other RNA
tgggggaggagattagatta

SEQ ID NO: 10488 - RNA, 20 nt, synthetic construct
  source 1..20: mol_type = other RNA
tggggggaactaatgactct

SEQ ID NO: 10489 - RNA, 20 nt, synthetic construct
  source 1..20: mol_type = other RNA
tggggtggagccctcaggct

SEQ ID NO: 10490 - RNA, 21 nt, synthetic construct
  source 1..21: mol_type = other RNA
tggggttactctctgaatttt

SEQ ID NO: 10491 - RNA, 20 nt, synthetic construct
  source 1..20: mol_type = other RNA
tgggtgggtgttaatttgga

SEQ ID NO: 10492 - RNA, 21 nt, synthetic construct
  source 1..21: mol_type = other RNA
tgggttatgtcattggaagtt

SEQ ID NO: 10493 - RNA, 20 nt, synthetic construct
  source 1..20: mol_type = other RNA
tgggtttcaccccaccgcac

SEQ ID NO: 10494 - RNA, 21 nt, synthetic construct
  source 1..21: mol_type = other RNA
tgggttttgctgccccattta

SEQ ID NO: 10495 - RNA, 20 nt, synthetic construct
  source 1..20: mol_type = other RNA
tggtcccgtgctggtggttg

SEQ ID NO: 10496 - RNA, 20 nt, synthetic construct
  source 1..20: mol_type = other RNA
tggtcgggaaagaatcccag

SEQ ID NO: 10497 - RNA, 20 nt, synthetic construct
  source 1..20: mol_type = other RNA
tggtcggtcggaacggcaga

SEQ ID NO: 10498 - RNA, 20 nt, synthetic construct
  source 1..20: mol_type = other RNA
tggtctataagctggaggag

SEQ ID NO: 10499 - RNA, 21 nt, synthetic construct
  source 1..21: mol_type = other RNA
tggtctataagctggaggagt

SEQ ID NO: 10500 - RNA, 20 nt, synthetic construct
  source 1..20: mol_type = other RNA
tggtctccatgcgacgtgca

SEQ ID NO: 10501 - RNA, 20 nt, synthetic construct
  source 1..20: mol_type = other RNA
tggtctgcgcaccagcacca

SEQ ID NO: 10502 - RNA, 20 nt, synthetic construct
  source 1..20: mol_type = other RNA
tggtgacccacaaaatgagg

SEQ ID NO: 10503 - RNA, 20 nt, synthetic construct
  source 1..20: mol_type = other RNA
tggtgaggtgaacaatgctc

SEQ ID NO: 10504 - RNA, 20 nt, synthetic construct
  source 1..20: mol_type = other RNA
tggtgagtgattggaggttg

SEQ ID NO: 10505 - RNA, 20 nt, synthetic construct
  source 1..20: mol_type = other RNA
tggtggctccagttcaggag

SEQ ID NO: 10506 - RNA, 20 nt, synthetic construct
  source 1..20: mol_type = other RNA
tggtggtcgggaaagaatcc

SEQ ID NO: 10507 - RNA, 20 nt, synthetic construct
  source 1..20: mol_type = other RNA
tggtggtctataagctggag

SEQ ID NO: 10508 - RNA, 20 nt, synthetic construct
  source 1..20: mol_type = other RNA
tggtgtaaatgtatattagg

SEQ ID NO: 10509 - RNA, 21 nt, synthetic construct
  source 1..21: mol_type = other RNA
tggtgtaaatgtatattagga

SEQ ID NO: 10510 - RNA, 20 nt, synthetic construct
  source 1..20: mol_type = other RNA
tggtgttttccaatgaggat

SEQ ID NO: 10511 - RNA, 20 nt, synthetic construct
  source 1..20: mol_type = other RNA
tggttatcgctggatgtgtc

SEQ ID NO: 10512 - RNA, 20 nt, synthetic construct
  source 1..20: mol_type = other RNA
tggttgaggatcctggaatt

SEQ ID NO: 10513 - RNA, 20 nt, synthetic construct
  source 1..20: mol_type = other RNA
tgtaaatagtgtctagtttg

SEQ ID NO: 10514 - RNA, 20 nt, synthetic construct
  source 1..20: mol_type = other RNA
tgtaaatgtatattaggaaa

SEQ ID NO: 10515 - RNA, 21 nt, synthetic construct
  source 1..21: mol_type = other RNA
tgtaaatgtatattaggaaaa

SEQ ID NO: 10516 - RNA, 20 nt, synthetic construct
  source 1..20: mol_type = other RNA
tgtaacacgagaaggggtcc

SEQ ID NO: 10517 - RNA, 21 nt, synthetic construct
  source 1..21: mol_type = other RNA
tgtaacacgagaaggggtcct

SEQ ID NO: 10518 - RNA, 20 nt, synthetic construct
  source 1..20: mol_type = other RNA
tgtaagttggcgagaaagtg

SEQ ID NO: 10519 - RNA, 20 nt, synthetic construct
  source 1..20: mol_type = other RNA
tgtaccaaaccttcggacgg

SEQ ID NO: 10520 - RNA, 21 nt, synthetic construct
  source 1..21: mol_type = other RNA
tgtagatcttgttcccaagaa

SEQ ID NO: 10521 - RNA, 20 nt, synthetic construct
  source 1..20: mol_type = other RNA
tgtaggcataaattggtctg

SEQ ID NO: 10522 - RNA, 20 nt, synthetic construct
  source 1..20: mol_type = other RNA
tgtagtatgccctgagcctg

SEQ ID NO: 10523 - RNA, 20 nt, synthetic construct
  source 1..20: mol_type = other RNA
tgtatacccaaagacaaaag

SEQ ID NO: 10524 - RNA, 20 nt, synthetic construct
  source 1..20: mol_type = other RNA
tgtatatttgcgggagagga

SEQ ID NO: 10525 - RNA, 20 nt, synthetic construct
  source 1..20: mol_type = other RNA
tgtatgatgtgttcttgtgg

SEQ ID NO: 10526 - RNA, 20 nt, synthetic construct
  source 1..20: mol_type = other RNA
tgtatgcatgtattcaatct

SEQ ID NO: 10527 - RNA, 20 nt, synthetic construct
  source 1..20: mol_type = other RNA
tgtcaacactaatatgggcc

SEQ ID NO: 10528 - RNA, 21 nt, synthetic construct
  source 1..21: mol_type = other RNA
tgtcaacgaattgtgggtctt

SEQ ID NO: 10529 - RNA, 20 nt, synthetic construct
  source 1..20: mol_type = other RNA
tgtcctactgttcaagcctc

SEQ ID NO: 10530 - RNA, 21 nt, synthetic construct
  source 1..21: mol_type = other RNA
tgtccttgttgggattgaagt

SEQ ID NO: 10531 - RNA, 20 nt, synthetic construct
  source 1..20: mol_type = other RNA
tgtctggcgattggtggagg

SEQ ID NO: 10532 - RNA, 20 nt, synthetic construct
  source 1..20: mol_type = other RNA
tgtcttggtgtaaatgtata

SEQ ID NO: 10533 - RNA, 20 nt, synthetic construct
  source 1..20: mol_type = other RNA
tgtctttaatcctcattgga

SEQ ID NO: 10534 - RNA, 20 nt, synthetic construct
  source 1..20: mol_type = other RNA
tgtctttcggagtgtggatt

SEQ ID NO: 10535 - RNA, 20 nt, synthetic construct
  source 1..20: mol_type = other RNA
tgtgaggattcttgtcaaca

SEQ ID NO: 10536 - RNA, 20 nt, synthetic construct
  source 1..20: mol_type = other RNA
tgtgcacttcgcttcacctc

SEQ ID NO: 10537 - RNA, 20 nt, synthetic construct
  source 1..20: mol_type = other RNA
tgtgccttgggtggctttgg

SEQ ID NO: 10538 - RNA, 20 nt, synthetic construct
  source 1..20: mol_type = other RNA
tgtggagttactctcgtttt

SEQ ID NO: 10539 - RNA, 20 nt, synthetic construct
  source 1..20: mol_type = other RNA
tgtgggtcaccatattcttg

SEQ ID NO: 10540 - RNA, 20 nt, synthetic construct
  source 1..20: mol_type = other RNA
tgtgtaaatagtgtctagtt

SEQ ID NO: 10541 - RNA, 21 nt, synthetic construct
  source 1..21: mol_type = other RNA
tgtgtaaatagtgtctagttt

SEQ ID NO: 10542 - RNA, 20 nt, synthetic construct
  source 1..20: mol_type = other RNA
tgtgtcttggccaaaattcg

SEQ ID NO: 10543 - RNA, 20 nt, synthetic construct
  source 1..20: mol_type = other RNA
tgtgttgtttctctcttata

SEQ ID NO: 10544 - RNA, 20 nt, synthetic construct
  source 1..20: mol_type = other RNA
tgttaataggaagttttcta

SEQ ID NO: 10545 - RNA, 21 nt, synthetic construct
  source 1..21: mol_type = other RNA
tgttagtattccttggactca

SEQ ID NO: 10546 - RNA, 20 nt, synthetic construct
  source 1..20: mol_type = other RNA
tgttcatgtcctactgttca

SEQ ID NO: 10547 - RNA, 20 nt, synthetic construct
  source 1..20: mol_type = other RNA
tgttctccatgttcagcgca

SEQ ID NO: 10548 - RNA, 20 nt, synthetic construct
  source 1..20: mol_type = other RNA
tgttgacataactgactact

SEQ ID NO: 10549 - RNA, 20 nt, synthetic construct
  source 1..20: mol_type = other RNA
tgttgcccaaggtcttacat

SEQ ID NO: 10550 - RNA, 20 nt, synthetic construct
  source 1..20: mol_type = other RNA
tgttgctgtaccaaaccttc

SEQ ID NO: 10551 - RNA, 21 nt, synthetic construct
  source 1..21: mol_type = other RNA
tgttgggattgaagtcccaat

SEQ ID NO: 10552 - RNA, 20 nt, synthetic construct
  source 1..20: mol_type = other RNA
tgttggttcttctggactat

SEQ ID NO: 10553 - RNA, 20 nt, synthetic construct
  source 1..20: mol_type = other RNA
tgtttacgtcccgtcggcgc

SEQ ID NO: 10554 - RNA, 20 nt, synthetic construct
  source 1..20: mol_type = other RNA
tgtttctcaaaggtggagac

SEQ ID NO: 10555 - RNA, 20 nt, synthetic construct
  source 1..20: mol_type = other RNA
tgtttgctccagacctgctg

SEQ ID NO: 10556 - RNA, 20 nt, synthetic construct
  source 1..20: mol_type = other RNA
tgtttggctttcagttatat

SEQ ID NO: 10557 - RNA, 21 nt, synthetic construct
  source 1..21: mol_type = other RNA
tgtttggctttcagttatatg

SEQ ID NO: 10558 - RNA, 20 nt, synthetic construct
  source 1..20: mol_type = other RNA
tgtttgtttaaagactggga

SEQ ID NO: 10559 - RNA, 20 nt, synthetic construct
  source 1..20: mol_type = other RNA
tgttttagaaaacttcctat

SEQ ID NO: 10560 - RNA, 20 nt, synthetic construct
  source 1..20: mol_type = other RNA
tgttttccaatgaggattaa

SEQ ID NO: 10561 - RNA, 20 nt, synthetic construct
  source 1..20: mol_type = other RNA
tgttttgctcgcagcaggtc

SEQ ID NO: 10562 - RNA, 20 nt, synthetic construct
  source 1..20: mol_type = other RNA
ttaaaccctaacaaaacaaa

SEQ ID NO: 10563 - RNA, 20 nt, synthetic construct
  source 1..20: mol_type = other RNA
ttaaagacaggtacagtaga

SEQ ID NO: 10564 - RNA, 20 nt, synthetic construct
  source 1..20: mol_type = other RNA
ttaaagactgggaggagttg

SEQ ID NO: 10565 - RNA, 20 nt, synthetic construct
  source 1..20: mol_type = other RNA
ttaaaggtctttgtactagg

SEQ ID NO: 10566 - RNA, 20 nt, synthetic construct
  source 1..20: mol_type = other RNA
ttaaatgtatacccaaagac

SEQ ID NO: 10567 - RNA, 20 nt, synthetic construct
  source 1..20: mol_type = other RNA
ttaacacccacccaggtagc

SEQ ID NO: 10568 - RNA, 20 nt, synthetic construct
  source 1..20: mol_type = other RNA
ttaacaggcctattgattgg

SEQ ID NO: 10569 - RNA, 21 nt, synthetic construct
  source 1..21: mol_type = other RNA
ttaactagatgttctggataa

SEQ ID NO: 10570 - RNA, 20 nt, synthetic construct
  source 1..20: mol_type = other RNA
ttaactgtaagtgggcctac

SEQ ID NO: 10571 - RNA, 20 nt, synthetic construct
  source 1..20: mol_type = other RNA
ttaatacccttatccaatgg

SEQ ID NO: 10572 - RNA, 20 nt, synthetic construct
  source 1..20: mol_type = other RNA
ttaatcattacttccaaact

SEQ ID NO: 10573 - RNA, 20 nt, synthetic construct
  source 1..20: mol_type = other RNA
ttaatgagaaaagaagattg

SEQ ID NO: 10574 - RNA, 20 nt, synthetic construct
  source 1..20: mol_type = other RNA
ttacacactctatggaaggc

SEQ ID NO: 10575 - RNA, 20 nt, synthetic construct
  source 1..20: mol_type = other RNA
ttacaccaagacattatcaa

SEQ ID NO: 10576 - RNA, 20 nt, synthetic construct
  source 1..20: mol_type = other RNA
ttacagttaatgagaaaaga

SEQ ID NO: 10577 - RNA, 20 nt, synthetic construct
  source 1..20: mol_type = other RNA
ttaccattggataagggtat

SEQ ID NO: 10578 - RNA, 20 nt, synthetic construct
  source 1..20: mol_type = other RNA
ttaccccgttgcccggcaac

SEQ ID NO: 10579 - RNA, 20 nt, synthetic construct
  source 1..20: mol_type = other RNA
ttacgcggactccccgtctg

SEQ ID NO: 10580 - RNA, 20 nt, synthetic construct
  source 1..20: mol_type = other RNA
ttactctcgtttttgccttc

SEQ ID NO: 10581 - RNA, 20 nt, synthetic construct
  source 1..20: mol_type = other RNA
ttactgctcctgaactggag

SEQ ID NO: 10582 - RNA, 20 nt, synthetic construct
  source 1..20: mol_type = other RNA
ttagaaaacttcctattaac

SEQ ID NO: 10583 - RNA, 20 nt, synthetic construct
  source 1..20: mol_type = other RNA
ttagattaaaggtctttgta

SEQ ID NO: 10584 - RNA, 20 nt, synthetic construct
  source 1..20: mol_type = other RNA
ttagattgaatacatgcata

SEQ ID NO: 10585 - RNA, 20 nt, synthetic construct
  source 1..20: mol_type = other RNA
ttaggcagaggtgaaaaagt

SEQ ID NO: 10586 - RNA, 20 nt, synthetic construct
  source 1..20: mol_type = other RNA
ttagggtttaaatgtatacc

SEQ ID NO: 10587 - RNA, 20 nt, synthetic construct
  source 1..20: mol_type = other RNA
ttagtattccttggactcat

SEQ ID NO: 10588 - RNA, 20 nt, synthetic construct
  source 1..20: mol_type = other RNA
ttatatggatgatgtggtat

SEQ ID NO: 10589 - RNA, 20 nt, synthetic construct
  source 1..20: mol_type = other RNA
ttatcagtcccgataatgtt

SEQ ID NO: 10590 - RNA, 20 nt, synthetic construct
  source 1..20: mol_type = other RNA
ttatcgctggatgtgtctgc

SEQ ID NO: 10591 - RNA, 20 nt, synthetic construct
  source 1..20: mol_type = other RNA
ttcaaagactgtttgtttaa

SEQ ID NO: 10592 - RNA, 21 nt, synthetic construct
  source 1..21: mol_type = other RNA
ttcaagcctccaagctgtgcc

SEQ ID NO: 10593 - RNA, 20 nt, synthetic construct
  source 1..20: mol_type = other RNA
ttcacctctgcacgtcgcat

SEQ ID NO: 10594 - RNA, 20 nt, synthetic construct
  source 1..20: mol_type = other RNA
ttcactttctcgccaactta

SEQ ID NO: 10595 - RNA, 21 nt, synthetic construct
  source 1..21: mol_type = other RNA
ttcagagcaaacacagcaaat

SEQ ID NO: 10596 - RNA, 20 nt, synthetic construct
  source 1..20: mol_type = other RNA
ttcaggtattgtttacacag

SEQ ID NO: 10597 - RNA, 20 nt, synthetic construct
  source 1..20: mol_type = other RNA
ttccaaattaacacccaccc

SEQ ID NO: 10598 - RNA, 20 nt, synthetic construct
  source 1..20: mol_type = other RNA
ttccaatgacataacccata

SEQ ID NO: 10599 - RNA, 20 nt, synthetic construct
  source 1..20: mol_type = other RNA
ttccaatgaggattaaagac

SEQ ID NO: 10600 - RNA, 20 nt, synthetic construct
  source 1..20: mol_type = other RNA
ttccaggatcctcaaccacc

SEQ ID NO: 10601 - RNA, 20 nt, synthetic construct
  source 1..20: mol_type = other RNA
ttccccaccttatgagtcca

SEQ ID NO: 10602 - RNA, 20 nt, synthetic construct
  source 1..20: mol_type = other RNA
ttcccccactgtttggcttt

SEQ ID NO: 10603 - RNA, 20 nt, synthetic construct
  source 1..20: mol_type = other RNA
ttccccctagaaaattgaga

SEQ ID NO: 10604 - RNA, 20 nt, synthetic construct
  source 1..20: mol_type = other RNA
ttcccgagattgagatcttc

SEQ ID NO: 10605 - RNA, 20 nt, synthetic construct
  source 1..20: mol_type = other RNA
ttcccgatacagagctgagg

SEQ ID NO: 10606 - RNA, 20 nt, synthetic construct
  source 1..20: mol_type = other RNA
ttccgaaagcccaggatgat

SEQ ID NO: 10607 - RNA, 20 nt, synthetic construct
  source 1..20: mol_type = other RNA
ttccgcagtatggatcggca

SEQ ID NO: 10608 - RNA, 20 nt, synthetic construct
  source 1..20: mol_type = other RNA
ttccggaaactactgttgtt

SEQ ID NO: 10609 - RNA, 20 nt, synthetic construct
  source 1..20: mol_type = other RNA
ttccggaagtgttgatagga

SEQ ID NO: 10610 - RNA, 20 nt, synthetic construct
  source 1..20: mol_type = other RNA
ttccgtccgaaggtttggta

SEQ ID NO: 10611 - RNA, 20 nt, synthetic construct
  source 1..20: mol_type = other RNA
ttcctaatatacatttacac

SEQ ID NO: 10612 - RNA, 20 nt, synthetic construct
  source 1..20: mol_type = other RNA
ttcctatgggagtgggcctc

SEQ ID NO: 10613 - RNA, 20 nt, synthetic construct
  source 1..20: mol_type = other RNA
ttcctgtctggcgattggtg

SEQ ID NO: 10614 - RNA, 20 nt, synthetic construct
  source 1..20: mol_type = other RNA
ttccttgagcagtagtcatg

SEQ ID NO: 10615 - RNA, 20 nt, synthetic construct
  source 1..20: mol_type = other RNA
ttccttggactcataaggtg

SEQ ID NO: 10616 - RNA, 20 nt, synthetic construct
  source 1..20: mol_type = other RNA
ttcgcactcctccagcttat

SEQ ID NO: 10617 - RNA, 20 nt, synthetic construct
  source 1..20: mol_type = other RNA
ttcgcttcacctctgcacgt

SEQ ID NO: 10618 - RNA, 20 nt, synthetic construct
  source 1..20: mol_type = other RNA
ttctcaaaggtggagacagc

SEQ ID NO: 10619 - RNA, 20 nt, synthetic construct
  source 1..20: mol_type = other RNA
ttctcatctgccggaccgtg

SEQ ID NO: 10620 - RNA, 20 nt, synthetic construct
  source 1..20: mol_type = other RNA
ttctcgaggattggggaccc

SEQ ID NO: 10621 - RNA, 20 nt, synthetic construct
  source 1..20: mol_type = other RNA
ttctctcaattttctagggg

SEQ ID NO: 10622 - RNA, 20 nt, synthetic construct
  source 1..20: mol_type = other RNA
ttctcttccaaaagtgagac

SEQ ID NO: 10623 - RNA, 21 nt, synthetic construct
  source 1..21: mol_type = other RNA
ttctcttccaaaagtgagaca

SEQ ID NO: 10624 - RNA, 20 nt, synthetic construct
  source 1..20: mol_type = other RNA
ttcttgggaacaagatctac

SEQ ID NO: 10625 - RNA, 20 nt, synthetic construct
  source 1..20: mol_type = other RNA
ttcttgtctcacttttggaa

SEQ ID NO: 10626 - RNA, 20 nt, synthetic construct
  source 1..20: mol_type = other RNA
ttctttcccgaccaccagtt

SEQ ID NO: 10627 - RNA, 20 nt, synthetic construct
  source 1..20: mol_type = other RNA
ttgaacagtaggacatgaac

SEQ ID NO: 10628 - RNA, 21 nt, synthetic construct
  source 1..21: mol_type = other RNA
ttgaacagtaggacatgaaca

SEQ ID NO: 10629 - RNA, 20 nt, synthetic construct
  source 1..20: mol_type = other RNA
ttgaagtcccaatctggatt

SEQ ID NO: 10630 - RNA, 20 nt, synthetic construct
  source 1..20: mol_type = other RNA
ttgacatactttccaatcaa

SEQ ID NO: 10631 - RNA, 20 nt, synthetic construct
  source 1..20: mol_type = other RNA
ttgacattgcagagagtcca

SEQ ID NO: 10632 - RNA, 20 nt, synthetic construct
  source 1..20: mol_type = other RNA
ttgagaaacactcatcctca

SEQ ID NO: 10633 - RNA, 20 nt, synthetic construct
  source 1..20: mol_type = other RNA
ttgaggatcctggaattaga

SEQ ID NO: 10634 - RNA, 20 nt, synthetic construct
  source 1..20: mol_type = other RNA
ttgattggaaagtatgtcaa

SEQ ID NO: 10635 - RNA, 20 nt, synthetic construct
  source 1..20: mol_type = other RNA
ttgcaatcttcttttctcat

SEQ ID NO: 10636 - RNA, 20 nt, synthetic construct
  source 1..20: mol_type = other RNA
ttgcaattgattatgcctgc

SEQ ID NO: 10637 - RNA, 21 nt, synthetic construct
  source 1..21: mol_type = other RNA
ttgcatggtgctggtgcgcag

SEQ ID NO: 10638 - RNA, 20 nt, synthetic construct
  source 1..20: mol_type = other RNA
ttgccagcaaatccgcctcc

SEQ ID NO: 10639 - RNA, 20 nt, synthetic construct
  source 1..20: mol_type = other RNA
ttgcccaaggtcttacataa

SEQ ID NO: 10640 - RNA, 21 nt, synthetic construct
  source 1..21: mol_type = other RNA
ttgcctgaactttaggcccat

SEQ ID NO: 10641 - RNA, 20 nt, synthetic construct
  source 1..20: mol_type = other RNA
ttgcctgagtgcagtatggt

SEQ ID NO: 10642 - RNA, 21 nt, synthetic construct
  source 1..21: mol_type = other RNA
ttgctctgaaggctggatcca

SEQ ID NO: 10643 - RNA, 20 nt, synthetic construct
  source 1..20: mol_type = other RNA
ttgctgacgcaacccccact

SEQ ID NO: 10644 - RNA, 21 nt, synthetic construct
  source 1..21: mol_type = other RNA
ttgctgtgtttgctctgaagg

SEQ ID NO: 10645 - RNA, 20 nt, synthetic construct
  source 1..20: mol_type = other RNA
ttgcttgcctgagtgcagta

SEQ ID NO: 10646 - RNA, 20 nt, synthetic construct
  source 1..20: mol_type = other RNA
ttggaagagaaaccgttata

SEQ ID NO: 10647 - RNA, 20 nt, synthetic construct
  source 1..20: mol_type = other RNA
ttggaagatccagcatctag

SEQ ID NO: 10648 - RNA, 20 nt, synthetic construct
  source 1..20: mol_type = other RNA
ttggaggacaggaggttggt

SEQ ID NO: 10649 - RNA, 21 nt, synthetic construct
  source 1..21: mol_type = other RNA
ttggaggacaggaggttggtg

SEQ ID NO: 10650 - RNA, 20 nt, synthetic construct
  source 1..20: mol_type = other RNA
ttggatccagccttcagagc

SEQ ID NO: 10651 - RNA, 20 nt, synthetic construct
  source 1..20: mol_type = other RNA
ttggcgagaaagtgaaagcc

SEQ ID NO: 10652 - RNA, 20 nt, synthetic construct
  source 1..20: mol_type = other RNA
ttggctttcagttatatgga

SEQ ID NO: 10653 - RNA, 20 nt, synthetic construct
  source 1..20: mol_type = other RNA
ttgggacttcaatcccaaca

SEQ ID NO: 10654 - RNA, 20 nt, synthetic construct
  source 1..20: mol_type = other RNA
ttgggattgaagtcccaatc

SEQ ID NO: 10655 - RNA, 20 nt, synthetic construct
  source 1..20: mol_type = other RNA
ttgggggaggagattagatt

SEQ ID NO: 10656 - RNA, 20 nt, synthetic construct
  source 1..20: mol_type = other RNA
ttgggtatacatttaaaccc

SEQ ID NO: 10657 - RNA, 20 nt, synthetic construct
  source 1..20: mol_type = other RNA
ttggtaacagcggtaaaaag

SEQ ID NO: 10658 - RNA, 20 nt, synthetic construct
  source 1..20: mol_type = other RNA
ttggtgagtgattggaggtt

SEQ ID NO: 10659 - RNA, 20 nt, synthetic construct
  source 1..20: mol_type = other RNA
ttggtggtctataagctgga

SEQ ID NO: 10660 - RNA, 20 nt, synthetic construct
  source 1..20: mol_type = other RNA
ttggtgtaaatgtatattag

SEQ ID NO: 10661 - RNA, 20 nt, synthetic construct
  source 1..20: mol_type = other RNA
ttggttcttctggactatca

SEQ ID NO: 10662 - RNA, 20 nt, synthetic construct
  source 1..20: mol_type = other RNA
ttgtaagttggcgagaaagt

SEQ ID NO: 10663 - RNA, 21 nt, synthetic construct
  source 1..21: mol_type = other RNA
ttgtactaggaggctgtaggc

SEQ ID NO: 10664 - RNA, 20 nt, synthetic construct
  source 1..20: mol_type = other RNA
ttgtagtatgccctgagcct

SEQ ID NO: 10665 - RNA, 20 nt, synthetic construct
  source 1..20: mol_type = other RNA
ttgtatgcatgtattcaatc

SEQ ID NO: 10666 - RNA, 20 nt, synthetic construct
  source 1..20: mol_type = other RNA
ttgtctcacttttggaagag

SEQ ID NO: 10667 - RNA, 20 nt, synthetic construct
  source 1..20: mol_type = other RNA
ttgtctttgggtatacattt

SEQ ID NO: 10668 - RNA, 20 nt, synthetic construct
  source 1..20: mol_type = other RNA
ttgtgaggattcttgtcaac

SEQ ID NO: 10669 - RNA, 21 nt, synthetic construct
  source 1..21: mol_type = other RNA
ttgtggcaaggacccataact

SEQ ID NO: 10670 - RNA, 20 nt, synthetic construct
  source 1..20: mol_type = other RNA
ttgtgggtcaccatattctt

SEQ ID NO: 10671 - RNA, 20 nt, synthetic construct
  source 1..20: mol_type = other RNA
ttgttcatgtcctactgttc

SEQ ID NO: 10672 - RNA, 21 nt, synthetic construct
  source 1..21: mol_type = other RNA
ttgttggttcttctggactat

SEQ ID NO: 10673 - RNA, 21 nt, synthetic construct
  source 1..21: mol_type = other RNA
ttgtttacacagaaaggcctt

SEQ ID NO: 10674 - RNA, 20 nt, synthetic construct
  source 1..20: mol_type = other RNA
tttaaaccctaacaaaacaa

SEQ ID NO: 10675 - RNA, 20 nt, synthetic construct
  source 1..20: mol_type = other RNA
tttaaagactgggaggagtt

SEQ ID NO: 10676 - RNA, 20 nt, synthetic construct
  source 1..20: mol_type = other RNA
tttaaatgtatacccaaaga

SEQ ID NO: 10677 - RNA, 20 nt, synthetic construct
  source 1..20: mol_type = other RNA
tttaatctaatctcctcccc

SEQ ID NO: 10678 - RNA, 20 nt, synthetic construct
  source 1..20: mol_type = other RNA
tttacacaatgtggttatcc

SEQ ID NO: 10679 - RNA, 20 nt, synthetic construct
  source 1..20: mol_type = other RNA
tttacacactctatggaagg

SEQ ID NO: 10680 - RNA, 20 nt, synthetic construct
  source 1..20: mol_type = other RNA
tttacacagaaaggccttgt

SEQ ID NO: 10681 - RNA, 20 nt, synthetic construct
  source 1..20: mol_type = other RNA
tttacaccaagacattatca

SEQ ID NO: 10682 - RNA, 20 nt, synthetic construct
  source 1..20: mol_type = other RNA
tttaccccgttgcccggcaa

SEQ ID NO: 10683 - RNA, 20 nt, synthetic construct
  source 1..20: mol_type = other RNA
tttagaaaacttcctattaa

SEQ ID NO: 10684 - RNA, 20 nt, synthetic construct
  source 1..20: mol_type = other RNA
tttataagggtcgatgtcca

SEQ ID NO: 10685 - RNA, 20 nt, synthetic construct
  source 1..20: mol_type = other RNA
tttatgggttatgtcattgg

SEQ ID NO: 10686 - RNA, 20 nt, synthetic construct
  source 1..20: mol_type = other RNA
tttcagttatatggatgatg

SEQ ID NO: 10687 - RNA, 20 nt, synthetic construct
  source 1..20: mol_type = other RNA
tttccaatcaataggcctgt

SEQ ID NO: 10688 - RNA, 20 nt, synthetic construct
  source 1..20: mol_type = other RNA
tttccaatgaggattaaaga

SEQ ID NO: 10689 - RNA, 20 nt, synthetic construct
  source 1..20: mol_type = other RNA
tttccaccagcaatcctctg

SEQ ID NO: 10690 - RNA, 20 nt, synthetic construct
  source 1..20: mol_type = other RNA
tttccgaaagcccaggatga

SEQ ID NO: 10691 - RNA, 21 nt, synthetic construct
  source 1..21: mol_type = other RNA
tttccttcagtacgagatctt

SEQ ID NO: 10692 - RNA, 20 nt, synthetic construct
  source 1..20: mol_type = other RNA
tttctcaaaggtggagacag

SEQ ID NO: 10693 - RNA, 20 nt, synthetic construct
  source 1..20: mol_type = other RNA
tttctcattaactgtaagtg

SEQ ID NO: 10694 - RNA, 20 nt, synthetic construct
  source 1..20: mol_type = other RNA
tttctcctggctcagtttac

SEQ ID NO: 10695 - RNA, 20 nt, synthetic construct
  source 1..20: mol_type = other RNA
tttctcttccaaaagtgaga

SEQ ID NO: 10696 - RNA, 20 nt, synthetic construct
  source 1..20: mol_type = other RNA
tttctgtgtaaacaatacct

SEQ ID NO: 10697 - RNA, 20 nt, synthetic construct
  source 1..20: mol_type = other RNA
tttcttgtctcacttttgga

SEQ ID NO: 10698 - RNA, 21 nt, synthetic construct
  source 1..21: mol_type = other RNA
tttcttgttgacaagaatcct

SEQ ID NO: 10699 - RNA, 20 nt, synthetic construct
  source 1..20: mol_type = other RNA
tttgaagtatgcctcaaggt

SEQ ID NO: 10700 - RNA, 20 nt, synthetic construct
  source 1..20: mol_type = other RNA
tttgagaaacactcatcctc

SEQ ID NO: 10701 - RNA, 21 nt, synthetic construct
  source 1..21: mol_type = other RNA
tttgccttctgacttctttcc

SEQ ID NO: 10702 - RNA, 20 nt, synthetic construct
  source 1..20: mol_type = other RNA
tttgctccagacctgctgcg

SEQ ID NO: 10703 - RNA, 20 nt, synthetic construct
  source 1..20: mol_type = other RNA
tttgctcgcagcaggtctgg

SEQ ID NO: 10704 - RNA, 20 nt, synthetic construct
  source 1..20: mol_type = other RNA
tttgctctgaaggctggatc

SEQ ID NO: 10705 - RNA, 20 nt, synthetic construct
  source 1..20: mol_type = other RNA
tttgctgacgcaacccccac

SEQ ID NO: 10706 - RNA, 21 nt, synthetic construct
  source 1..21: mol_type = other RNA
tttgctgccccatttacacaa

SEQ ID NO: 10707 - RNA, 20 nt, synthetic construct
  source 1..20: mol_type = other RNA
tttgctgtgtttgctctgaa

SEQ ID NO: 10708 - RNA, 20 nt, synthetic construct
  source 1..20: mol_type = other RNA
tttggaagagaaaccgttat

SEQ ID NO: 10709 - RNA, 20 nt, synthetic construct
  source 1..20: mol_type = other RNA
tttggaagatccagcatcta

SEQ ID NO: 10710 - RNA, 20 nt, synthetic construct
  source 1..20: mol_type = other RNA
tttggaagtaatgattaact

SEQ ID NO: 10711 - RNA, 20 nt, synthetic construct
  source 1..20: mol_type = other RNA
tttggtggtctataagctgg

SEQ ID NO: 10712 - RNA, 20 nt, synthetic construct
  source 1..20: mol_type = other RNA
tttggtgtctttcggagtgt

SEQ ID NO: 10713 - RNA, 20 nt, synthetic construct
  source 1..20: mol_type = other RNA
tttgtaggcccacttacagt

SEQ ID NO: 10714 - RNA, 20 nt, synthetic construct
  source 1..20: mol_type = other RNA
tttgtagtatgccctgagcc

SEQ ID NO: 10715 - RNA, 20 nt, synthetic construct
  source 1..20: mol_type = other RNA
tttgtatgatgtgttcttgt

SEQ ID NO: 10716 - RNA, 20 nt, synthetic construct
  source 1..20: mol_type = other RNA
tttgtctttgggtatacatt

SEQ ID NO: 10717 - RNA, 20 nt, synthetic construct
  source 1..20: mol_type = other RNA
tttgtgggtcaccatattct

SEQ ID NO: 10718 - RNA, 21 nt, synthetic construct
  source 1..21: mol_type = other RNA
tttgtttacgtcccgtcggcg

SEQ ID NO: 10719 - RNA, 20 nt, synthetic construct
  source 1..20: mol_type = other RNA
ttttatgggttatgtcattg

SEQ ID NO: 10720 - RNA, 21 nt, synthetic construct
  source 1..21: mol_type = other RNA
ttttccgaaagcccaggatga

SEQ ID NO: 10721 - RNA, 20 nt, synthetic construct
  source 1..20: mol_type = other RNA
ttttctcattaactgtaagt

SEQ ID NO: 10722 - RNA, 20 nt, synthetic construct
  source 1..20: mol_type = other RNA
ttttgataatgtcttggtgt

SEQ ID NO: 10723 - RNA, 20 nt, synthetic construct
  source 1..20: mol_type = other RNA
ttttgctcgcagcaggtctg

SEQ ID NO: 10724 - RNA, 20 nt, synthetic construct
  source 1..20: mol_type = other RNA
ttttggaagagaaaccgtta

SEQ ID NO: 10725 - RNA, 20 nt, synthetic construct
  source 1..20: mol_type = other RNA
ttttgtatgatgtgttcttg

SEQ ID NO: 10726 - RNA, 20 nt, synthetic construct
  source 1..20: mol_type = other RNA
tttttgataatgtcttggtg

SEQ ID NO: 10727 - RNA, 20 nt, synthetic construct
  source 1..20: mol_type = other RNA
cgactactgcctctccctta

SEQ ID NO: 10728 - RNA, 20 nt, synthetic construct
  source 1..20: mol_type = other RNA
ctaggaccccttctcgtgtt

SEQ ID NO: 10729 - RNA, 20 nt, synthetic construct
  source 1..20: mol_type = other RNA
acaagaatcctcacaatacc

SEQ ID NO: 10730 - RNA, 20 nt, synthetic construct
  source 1..20: mol_type = other RNA
tcgctggatgtgtctgcggc

SEQ ID NO: 10731 - RNA, 20 nt, synthetic construct
  source 1..20: mol_type = other RNA
ttctggactatcaaggtatg

SEQ ID NO: 10732 - RNA, 20 nt, synthetic construct
  source 1..20: mol_type = other RNA
gtcctctaattccaggatcc

SEQ ID NO: 10733 - RNA, 20 nt, synthetic construct
  source 1..20: mol_type = other RNA
caggatcctcaaccaccagc

SEQ ID NO: 10734 - RNA, 20 nt, synthetic construct
  source 1..20: mol_type = other RNA
cacctgtattcccatcccat

SEQ ID NO: 10735 - RNA, 20 nt, synthetic construct
  source 1..20: mol_type = other RNA
ccatcccatcatcctgggct

SEQ ID NO: 10736 - RNA, 20 nt, synthetic construct
  source 1..20: mol_type = other RNA
ctatgggagtgggcctcagc

SEQ ID NO: 10737 - RNA, 20 nt, synthetic construct
  source 1..20: mol_type = other RNA
gttcagtggttcgtagggct

SEQ ID NO: 10738 - RNA, 20 nt, synthetic construct
  source 1..20: mol_type = other RNA
ggctttcagttatatggatg

SEQ ID NO: 10739 - RNA, 20 nt, synthetic construct
  source 1..20: mol_type = other RNA
ggggccaagtctgtacagca

SEQ ID NO: 10740 - RNA, 20 nt, synthetic construct
  source 1..20: mol_type = other RNA
aaaccctaacaaaacaaaga

SEQ ID NO: 10741 - RNA, 20 nt, synthetic construct
  source 1..20: mol_type = other RNA
ctctctgaattttatgggtt

SEQ ID NO: 10742 - RNA, 20 nt, synthetic construct
  source 1..20: mol_type = other RNA
tatgggttatgtcattggaa

SEQ ID NO: 10743 - RNA, 20 nt, synthetic construct
  source 1..20: mol_type = other RNA
tgtcattggaagttatgggt

SEQ ID NO: 10744 - RNA, 20 nt, synthetic construct
  source 1..20: mol_type = other RNA
acaggcctattgattggaaa

SEQ ID NO: 10745 - RNA, 20 nt, synthetic construct
  source 1..20: mol_type = other RNA
attggaaagtatgtcaacga

SEQ ID NO: 10746 - RNA, 20 nt, synthetic construct
  source 1..20: mol_type = other RNA
acacaatgtggttatcctgc

SEQ ID NO: 10747 - RNA, 20 nt, synthetic construct
  source 1..20: mol_type = other RNA
aatctaagcaggctttcact

SEQ ID NO: 10748 - RNA, 20 nt, synthetic construct
  source 1..20: mol_type = other RNA
gctgacgcaacccccactgg

SEQ ID NO: 10749 - RNA, 20 nt, synthetic construct
  source 1..20: mol_type = other RNA
tcgggactgataactctgtt

SEQ ID NO: 10750 - RNA, 20 nt, synthetic construct
  source 1..20: mol_type = other RNA
cgaccgaccacggggcgcac

SEQ ID NO: 10751 - RNA, 20 nt, synthetic construct
  source 1..20: mol_type = other RNA
cccaaggtcttacataagag

SEQ ID NO: 10752 - RNA, 20 nt, synthetic construct
  source 1..20: mol_type = other RNA
ggggaggagattagattaaa

SEQ ID NO: 10753 - RNA, 20 nt, synthetic construct
  source 1..20: mol_type = other RNA
atgtcctactgttcaagcct

SEQ ID NO: 10754 - RNA, 20 nt, synthetic construct
  source 1..20: mol_type = other RNA
ggagctactgtggagttact

SEQ ID NO: 10755 - RNA, 20 nt, synthetic construct
  source 1..20: mol_type = other RNA
ttcacctcaccatactgcac

SEQ ID NO: 10756 - RNA, 20 nt, synthetic construct
  source 1..20: mol_type = other RNA
ggaagatccagcatctagag

SEQ ID NO: 10757 - RNA, 20 nt, synthetic construct
  source 1..20: mol_type = other RNA
aggcaactcttgtggtttca

SEQ ID NO: 10758 - RNA, 20 nt, synthetic construct
  source 1..20: mol_type = other RNA
ttagacgacgaggcaggtcc

SEQ ID NO: 10759 - RNA, 20 nt, synthetic construct
  source 1..20: mol_type = other RNA
cttggactcataaggtgggg

SEQ ID NO: 10760 - RNA, 20 nt, synthetic construct
  source 1..20: mol_type = other RNA
ttctactgtacctgtcttta

SEQ ID NO: 10761 - RNA, 20 nt, synthetic construct
  source 1..20: mol_type = other RNA
gaaaacaccatcttttccta

SEQ ID NO: 10762 - RNA, 20 nt, synthetic construct
  source 1..20: mol_type = other RNA
acaccaagacattatcaaaa

SEQ ID NO: 10763 - RNA, 20 nt, synthetic construct
  source 1..20: mol_type = other RNA
tcaaaaaatgtgaacagttt

SEQ ID NO: 10764 - RNA, 20 nt, synthetic construct
  source 1..20: mol_type = other RNA
atgagaaaagaagattgcaa

SEQ ID NO: 10765 - RNA, 20 nt, synthetic construct
  source 1..20: mol_type = other RNA
caattgattatgcctgctag

SEQ ID NO: 10766 - RNA, 20 nt, synthetic construct
  source 1..20: mol_type = other RNA
tatccaaaggttaccaaata

SEQ ID NO: 10767 - RNA, 20 nt, synthetic construct
  source 1..20: mol_type = other RNA
accattggataagggtatta

SEQ ID NO: 10768 - RNA, 20 nt, synthetic construct
  source 1..20: mol_type = other RNA
gataagggtattaaacctta

SEQ ID NO: 10769 - RNA, 20 nt, synthetic construct
  source 1..20: mol_type = other RNA
aaccttattatccagaacat

SEQ ID NO: 10770 - RNA, 20 nt, synthetic construct
  source 1..20: mol_type = other RNA
tccagaacatctagttaatc

SEQ ID NO: 10771 - RNA, 20 nt, synthetic construct
  source 1..20: mol_type = other RNA
atcattacttccaaactaga

SEQ ID NO: 10772 - RNA, 20 nt, synthetic construct
  source 1..20: mol_type = other RNA
cttccaaactagacactatt

SEQ ID NO: 10773 - RNA, 20 nt, synthetic construct
  source 1..20: mol_type = other RNA
acacactctatggaaggcgg

SEQ ID NO: 10774 - RNA, 20 nt, synthetic construct
  source 1..20: mol_type = other RNA
ttgggaacaagatctacagc

SEQ ID NO: 10775 - RNA, 20 nt, synthetic construct
  source 1..20: mol_type = other RNA
tttcccgaccaccagttgga

SEQ ID NO: 10776 - RNA, 20 nt, synthetic construct
  source 1..20: mol_type = other RNA
gatccagccttcagagcaaa

SEQ ID NO: 10777 - RNA, 20 nt, synthetic construct
  source 1..20: mol_type = other RNA
ggacttcaatcccaacaagg

SEQ ID NO: 10778 - RNA, 20 nt, synthetic construct
  source 1..20: mol_type = other RNA
caccccaccgcacggaggcc

SEQ ID NO: 10779 - RNA, 20 nt, synthetic construct
  source 1..20: mol_type = other RNA
ctcaaaggtggagacagcgg

SEQ ID NO: 10780 - RNA, 20 nt, synthetic construct
  source 1..20: mol_type = other RNA
gctggcaaagtttgtagtat

SEQ ID NO: 10781 - RNA, 20 nt, synthetic construct
  source 1..20: mol_type = other RNA
ggattgaagtcccaatctgg

SEQ ID NO: 10782 - RNA, 20 nt, synthetic construct
  source 1..20: mol_type = other RNA
aagtcccaatctggatttgc

SEQ ID NO: 10783 - RNA, 20 nt, synthetic construct
  source 1..20: mol_type = other RNA
gctctgaaggctggatccaa

SEQ ID NO: 10784 - RNA, 20 nt, synthetic construct
  source 1..20: mol_type = other RNA
ctggtggaaagattctgccc

SEQ ID NO: 10785 - RNA, 20 nt, synthetic construct
  source 1..20: mol_type = other RNA
tgccccatgctgtagatctt

SEQ ID NO: 10786 - RNA, 20 nt, synthetic construct
  source 1..20: mol_type = other RNA
ctctcttatataatataccc

SEQ ID NO: 10787 - RNA, 20 nt, synthetic construct
  source 1..20: mol_type = other RNA
ggaagtaatgattaactaga

SEQ ID NO: 10788 - RNA, 20 nt, synthetic construct
  source 1..20: mol_type = other RNA
tggataataaggtttaatac

SEQ ID NO: 10789 - RNA, 20 nt, synthetic construct
  source 1..20: mol_type = other RNA
actgtaagtgggcctacaaa

SEQ ID NO: 10790 - RNA, 20 nt, synthetic construct
  source 1..20: mol_type = other RNA
tttgataatgtcttggtgta

SEQ ID NO: 10791 - RNA, 20 nt, synthetic construct
  source 1..20: mol_type = other RNA
ggaaaagatggtgttttcca

SEQ ID NO: 10792 - RNA, 20 nt, synthetic construct
  source 1..20: mol_type = other RNA
tccaatgaggattaaagaca

SEQ ID NO: 10793 - RNA, 20 nt, synthetic construct
  source 1..20: mol_type = other RNA
aagacaggtacagtagaaga

SEQ ID NO: 10794 - RNA, 20 nt, synthetic construct
  source 1..20: mol_type = other RNA
cccaccttatgagtccaagg

SEQ ID NO: 10795 - RNA, 20 nt, synthetic construct
  source 1..20: mol_type = other RNA
ccgagattgagatcttctgc

SEQ ID NO: 10796 - RNA, 20 nt, synthetic construct
  source 1..20: mol_type = other RNA
ttcttctaggggacctgcct

SEQ ID NO: 10797 - RNA, 20 nt, synthetic construct
  source 1..20: mol_type = other RNA
ataggataggggcatttggt

SEQ ID NO: 10798 - RNA, 20 nt, synthetic construct
  source 1..20: mol_type = other RNA
ggtggtctataagctggagg

SEQ ID NO: 10799 - RNA, 20 nt, synthetic construct
  source 1..20: mol_type = other RNA
acataactgactactaggtc

SEQ ID NO: 10800 - RNA, 20 nt, synthetic construct
  source 1..20: mol_type = other RNA
acacccacccaggtagctag

SEQ ID NO: 10801 - RNA, 20 nt, synthetic construct
  source 1..20: mol_type = other RNA
cccccagcaaagaattgctt

SEQ ID NO: 10802 - RNA, 20 nt, synthetic construct
  source 1..20: mol_type = other RNA
ggcagaggtgaaaaagttgc

SEQ ID NO: 10803 - RNA, 20 nt, synthetic construct
  source 1..20: mol_type = other RNA
acattgcagagagtccaaga

SEQ ID NO: 10804 - RNA, 20 nt, synthetic construct
  source 1..20: mol_type = other RNA
cagagagtccaagagtcctc

SEQ ID NO: 10805 - RNA, 20 nt, synthetic construct
  source 1..20: mol_type = other RNA
gcgggagaggacaacagagt

SEQ ID NO: 10806 - RNA, 20 nt, synthetic construct
  source 1..20: mol_type = other RNA
cacgcacgcgctgatggccc

SEQ ID NO: 10807 - RNA, 20 nt, synthetic construct
  source 1..20: mol_type = other RNA
ccgggcaacggggtaaaggt

SEQ ID NO: 10808 - RNA, 20 nt, synthetic construct
  source 1..20: mol_type = other RNA
acacagaaaggccttgtaag

SEQ ID NO: 10809 - RNA, 20 nt, synthetic construct
  source 1..20: mol_type = other RNA
gcgagaaagtgaaagcctgc

SEQ ID NO: 10810 - RNA, 20 nt, synthetic construct
  source 1..20: mol_type = other RNA
aatacatgcatacaagggca

SEQ ID NO: 10811 - RNA, 20 nt, synthetic construct
  source 1..20: mol_type = other RNA
acgcaggataaccacattgt

SEQ ID NO: 10812 - RNA, 20 nt, synthetic construct
  source 1..20: mol_type = other RNA
tgtaaatggggcagcaaaac

SEQ ID NO: 10813 - RNA, 20 nt, synthetic construct
  source 1..20: mol_type = other RNA
gttgacatactttccaatca

SEQ ID NO: 10814 - RNA, 20 nt, synthetic construct
  source 1..20: mol_type = other RNA
acatactttccaatcaatag

SEQ ID NO: 10815 - RNA, 20 nt, synthetic construct
  source 1..20: mol_type = other RNA
ataggaagttttctaaaaca

SEQ ID NO: 10816 - RNA, 20 nt, synthetic construct
  source 1..20: mol_type = other RNA
tctaaaacattctttgattt

SEQ ID NO: 10817 - RNA, 20 nt, synthetic construct
  source 1..20: mol_type = other RNA
tttgattttttgtatgatgt

SEQ ID NO: 10818 - RNA, 20 nt, synthetic construct
  source 1..20: mol_type = other RNA
ttgtggcaaggacccataac

SEQ ID NO: 10819 - RNA, 20 nt, synthetic construct
  source 1..20: mol_type = other RNA
agagagtaaccccatctctt

SEQ ID NO: 10820 - RNA, 20 nt, synthetic construct
  source 1..20: mol_type = other RNA
tgttagggtttaaatgtata

SEQ ID NO: 10821 - RNA, 20 nt, synthetic construct
  source 1..20: mol_type = other RNA
gtaacagcggtaaaaaggga

SEQ ID NO: 10822 - RNA, 20 nt, synthetic construct
  source 1..20: mol_type = other RNA
ccgtccgaaggtttggtaca

SEQ ID NO: 10823 - RNA, 20 nt, synthetic construct
  source 1..20: mol_type = other RNA
ggtacagcaacaggagggat

SEQ ID NO: 10824 - RNA, 20 nt, synthetic construct
  source 1..20: mol_type = other RNA
cttgagcagtagtcatgcag

SEQ ID NO: 10825 - RNA, 20 nt, synthetic construct
  source 1..20: mol_type = other RNA
gaggacaaacgggcaacata

SEQ ID NO: 10826 - RNA, 20 nt, synthetic construct
  source 1..20: mol_type = other RNA
gtgagtgattggaggttggg

SEQ ID NO: 10827 - RNA, 20 nt, synthetic construct
  source 1..20: mol_type = other RNA
tggccaagacacacggtagt

SEQ ID NO: 10828 - RNA, 20 nt, synthetic construct
  source 1..20: mol_type = other RNA
cccctagaaaattgagagaa

SEQ ID NO: 10829 - RNA, 20 nt, synthetic construct
  source 1..20: mol_type = other RNA
ttgtcaacaagaaaaacccc

SEQ ID NO: 10830 - RNA, 20 nt, synthetic construct
  source 1..20: mol_type = other RNA
acgataagggagaggcagta

SEQ ID NO: 10831 - protein, 212 aa, Hepatitis B virus
MQLFHLCLIISCSCPTVQASKLCLGWLWGMDIDPYKEFGATVELLSFLPSDFFPSVRDLLDTASALYREALESPEHCSPHHTALRQAILCWGELMTLATWVGVNLEDPASRDLVVSYVNTNMGLKFRQLLWFHISCLTFGRETVIEYLVSFGVWIRTPPAYRPPNAPILSTLPETTVVRRRGRSPRRRTPSPRRRRSQSPRRRRSQSREPQC

SEQ ID NO: 10832 - protein, 1824 aa, synthetic construct
MSSETGPVAVDPTLRRRIEPHEFEVFFDPRELRKETCLLYEINWGGRHSIWRHTSQNTNKHVEVNFIEKFTTERYFCPNTRCSITWFLSWSPCGECSRAITEFLSRYPHVTLFIYIARLYHHADPRNRQGLRDLISSGVTIQIMTEQESGYCWRNFVNYSPSNEAHWPRYPHLWVRLYVLELYCIILGLPPCLNILRRKQPQLTFFTIALQSCHYQRLPPHILWATGLKSGGSSGGSSGSETPGTSESATPESSGGSSGGSDKKYSIGLAIGTNSVGWAVITDEYKVPSKKFKVLGNTDRHSIKKNLIGALLFDSGETAEATRLKRTARRRYTRRKNRICYLQEIFSNEMAKVDDSFFHRLEESFLVEEDKKHERHPIFGNIVDEVAYHEKYPTIYHLRKKLVDSTDKADLRLIYLALAHMIKFRGHFLIEGDLNPDNSDVDKLFIQLVQTYNQLFEENPINASGVDAKAILSARLSKSRRLENLIAQLPGEKKNGLFGNLIALSLGLTPNFKSNFDLAEDAKLQLSKDTYDDDLDNLLAQIGDQYADLFLAAKNLSDAILLSDILRVNTEITKAPLSASMIKRYDEHHQDLTLLKALVRQQLPEKYKEIFFDQSKNGYAGYIDGGASQEEFYKFIKPILEKMDGTEELLVKLNREDLLRKQRTFDNGSIPHQIHLGELHAILRRQEDFYPFLKDNREKIEKILTFRIPYYVGPLARGNSRFAWMTRKSEETITPWNFEEVVDKGASAQSFIERMTNFDKNLPNEKVLPKHSLLYEYFTVYNELTKVKYVTEGMRKPAFLSGEQKKAIVDLLFKTNRKVTVKQLKEDYFKKIECFDSVEISGVEDRFNASLGTYHDLLKIIKDKDFLDNEENEDILEDIVLTLTLFEDREMIEERLKTYAHLFDDKVMKQLKRRRYTGWGRLSRKLINGIRDKQSGKTILDFLKSDGFANRNFMQLIHDDSLTFKEDIQKAQVSGQGDSLHEHIANLAGSPAIKKGILQTVKVVDELVKVMGRHKPENIVIEMARENQTTQKGQKNSRERMKRIEEGIKELGSQILKEHPVENTQLQNEKLYLYYLQNGRDMYVDQELDINRLSDYDVDHIVPQSFLKDDSIDNKVLTRSDKNRGKSDNVPSEEVVKKMKNYWRQLLNAKLITQRKFDNLTKAERGGLSELDKAGFIKRQLVETRQITKHVAQILDSRMNTKYDENDKLIREVKVITLKSKLVSDFRKDFQFYKVREINNYHHAHDAYLNAVVGTALIKKYPKLESEFVYGDYKVYDVRKMIAKSEQEIGKATAKYFFYSNIMNFFKTEITLANGEIRKRPLIETNGETGEIVWDKGRDFATVRKVLSMPQVNIVKKTEVQTGGFSKESILPKRNSDKLIARKKDWDPKKYGGFDSPTVAYSVLVVAKVEKGKSKKLKSVKELLGITIMERSSFEKNPIDFLEAKGYKEVKKDLIIKLPKYSLFELENGRKRMLASAGELQKGNELALPSKYVNFLYLASHYEKLKGSPEDNEQKQLFVEQHKHYLDEIIEQISEFSKRVILADANLDKVLSAYNKHRDKPIREQAENIIHLFTLTNLGAPAAFKYFDTTIDRKRYTSTKEVLDATLIHQSITGLYETRIDLSQLGGDSGGSGGSGGSTNLSDIIEKETGKQLVIQESILMLPEEVEEVIGNKPESDILVHTAYDESTDENVMLLTSDAPEYKPWALVIQDSNGENKIKMLSGGSGGSGGSTNLSDIIEKETGKQLVIQESILMLPEEVEEVIGNKPESDILVHTAYDESTDENVMLLTSDAPEYKPWALVIQDSNGENKIKMLSGGSPKKKRK

SEQ ID NO: 10833 - DNA, 20 bp, synthetic construct
  source 1..20: mol_type = other DNA
gaaagcccaagatgatggga

SEQ ID NO: 10834 - RNA, 20 nt, synthetic construct
  source 1..20: mol_type = other RNA
gaaagcccaagatgatggga
